(19) United States
(12) Patent Application Publication
(10) Pub. No.: US 2013/0205446 A1
(43) Pub. Date: Aug. 8, 2013

(54) Plants Having Enhanced Yield-Related Traits and Method for Making the Same

(71) Applicants: Valerie Frankard, Waterloo (BE); Yves Hatzfeld, Lille (FR); Christophe Reuzeau, La Chapelle Gonaguet (FR); Ana Isabel Sanz Molinero, Madrid (ES)

(72) Inventors: Valerie Frankard, Waterloo (BE); Yves Hatzfeld, Lille (FR); Christophe Reuzeau, La Chapelle Gonaguet (FR); Ana Isabel Sanz Molinero, Madrid (ES)

(73) Assignee: BASF Plant Science Company GmbH, Ludwigshafen (DE)

(21) Appl. No.: 13/825,716

(22) PCT Filed: Sep. 20, 2011
(86) PCT No.: PCT/IB11/54120

§ 371 Date: Apr. 4, 2013

Related U.S. Application Data
(60) Provisional application No. 61/385,982, filed on Sep. 24, 2010.
(60) Provisional application No. 61/385,979, filed on Sep. 24, 2010.
(60) Provisional application No. 61/385,980, filed on Sep. 24, 2010.
(60) Provisional application No. 61/405,662, filed on Oct. 22, 2010.

(51) Int. Cl. C12N 15/82

(52) U.S. Cl. CPC C12N 15/8251
USPC 800/290; 435/320.1; 435/468; 800/298; 435/419; 800/320.2; 800/320.1; 800/320.3; 800/320; 435/412

(57) ABSTRACT

Nucleic acids and the encoded VIM1-like polypeptides, VTC2-like polypeptides, ARF6-like polypeptides or DUF1685 polypeptides are provided. A method of enhancing yield-related traits in plants by modulating expression of nucleic acids encoding VIM1-like polypeptides, VTC2-like polypeptides, ARF6-like polypeptides or DUF1685 polypeptides is provided. Plants with modulated expression of the nucleic acids encoding VIM1-like polypeptides, VTC2-like polypeptides, ARF6-like polypeptides or DUF1685 polypeptides have enhanced yield-related traits relative to control plants.

[0001] The present invention relates generally to the field of molecular biology and concerns a method for enhancing yield-related traits in plants by modulating expression in a plant of a nucleic acid encoding a VIM1 (Variant in Methylation 1)-like polypeptide or a VTC2-like (GDP-L-galactose phosphorylase) polypeptide, or a DUF1685 polypeptide, or an ARF6-like (Auxin Responsive Factor) polypeptide. The present invention also concerns plants having modulated expression of a nucleic acid encoding a VIM1 polypeptide, or a VTC2-like polypeptide, or a DUF1685 polypeptide, or an ARF6-like polypeptide, which plants have enhanced yield-related traits relative to corresponding wild type plants or other control plants. The invention also provides constructs useful in the methods of the invention.

[0002] The ever-increasing world population and the dwindling supply of arable land available for agriculture fuels research towards increasing the efficiency of agriculture. Conventional means for crop and horticultural improvements utilise selective breeding techniques to identify plants having desirable characteristics. However, such selective breeding techniques have several drawbacks, namely that these techniques are typically labour intensive and result in plants that often contain heterogeneous genetic components that may not always result in the desirable trait being passed on from parent plants. Advances in molecular biology have allowed mankind to modify the germplasm of animals and plants. Genetic engineering of plants entails the isolation and manipulation of genetic material (typically in the form of DNA or RNA) and the subsequent introduction of that genetic material into a plant. Such technology has the capacity to deliver crops or plants having various improved economic, agronomic or horticultural traits.

[0003] A trait of particular economic interest is increased yield. Yield is normally defined as the measurable produce of economic value from a crop. This may be defined in terms of quantity and/or quality. Yield is directly dependent on several factors, for example, the number and size of the organs, plant architecture (for example, the number of branches), seed production, leaf senescence and more. Root development, nutrient uptake, stress tolerance and early vigour may also be important factors in determining yield. Optimizing the abovementioned factors may therefore contribute to increasing crop yield.

[0004] Seed yield is a particularly important trait, since the seeds of many plants are important for human and animal nutrition. Crops such as corn, rice, wheat, canola and soybean account for over half the total human caloric intake, whether through direct consumption of the seeds themselves or through consumption of meat products raised on processed seeds. They are also a source of sugars, oils and many kinds of metabolites used in industrial processes. Seeds contain an embryo (the source of new shoots and roots) and an endosperm (the source of nutrients for embryo growth during germination and during early growth of seedlings). The development of a seed involves many genes, and requires the transfer of metabolites from the roots, leaves and stems into the growing seed. The endosperm, in particular, assimilates the metabolic precursors of carbohydrates, oils and proteins and synthesizes them into storage macromolecules to fill out the grain.

[0005] Another important trait for many crops is early vigour. Improving early vigour is an important objective of modern rice breeding programs in both temperate and tropical rice cultivars. Long roots are important for proper soil anchorage in water-seeded rice. Where rice is sown directly into flooded fields, and where plants must emerge rapidly through water, longer shoots are associated with vigour. Where drill-seeding is practiced, longer mesocotyls and coleoptiles are important for good seedling emergence. The ability to engineer early vigour into plants would be of great importance in agriculture. For example, poor early vigour has been a limitation to the introduction of maize (Zea mays L.) hybrids based on Corn Belt germplasm in the European Atlantic.

[0006] A further important trait is that of improved abiotic stress tolerance. Abiotic stress is a primary cause of crop loss worldwide, reducing average yields for most major crop plants by more than 50% (Wang et al., Planta 218, 1-14, 2003). Abiotic stresses may be caused by drought, salinity, extremes of temperature, chemical toxicity and oxidative stress. The ability to improve plant tolerance to abiotic stress would be of great economic advantage to farmers worldwide and would allow for the cultivation of crops during adverse conditions and in territories where cultivation of crops may not otherwise be possible.

[0007] Crop yield may therefore be increased by optimising one of the above-mentioned factors.

[0008] Depending on the end use, the modification of certain yield traits may be favoured over others. For example for applications such as forage or wood production, or bio-fuel resource, an increase in the vegetative parts of a plant may be desirable, and for applications such as flour, starch or oil production, an increase in seed parameters may be particularly desirable. Even amongst the seed parameters, some may be favoured over others, depending on the application. Various mechanisms may contribute to increasing seed yield, whether that is in the form of increased seed size or increased seed number.

[0009] It has now been found that various yield-related traits may be improved in plants by modulating expression in a plant of a nucleic acid encoding a VIM1 polypeptide, or a VTC2-like polypeptide, or a DUF1685 polypeptide, or an ARF6-like polypeptide in a plant.

### BACKGROUND

### VIM1 (Variant in Methylation 1)-Like Polypeptides

[0010] VIM1 (Variant In Methylation 1) encodes a 645-amino acid methylcytosine-binding protein with a PHD domain, two RING finger domains, and an SRA domain that is involved in centromere heterochromatinization. This protein functions as an E3 ubiquitin ligase in vitro. The protein has been shown to bind to methylated cytosines of CG, CNG and CNN motifs via its SRA domain but has a preference for the former. It plays a role in the establishment/maintenance of chromatin structure during cell division and is localized in the nucleus. Plants over-expressing VIM1/ORTH2 show an inhibition in root growth and a delay in flowering. Both over-expression of GFP:ORTH2 and loss of ORTH2/VIM1 lead to decreased levels of DNA methylation. GFP:ORTH2 over-expressers also have increased levels of FWA transcripts.

### VTC2-Like (GDP-L-Galactose Phosphorylase) Polypeptides

[0011] VTC2, which encode GDP-L-galactose phosphorylase, is one of the main control points in the synthesis of vitamine C (ascorbate). Its expression is correlated to the accumulation of ascorbate in leaves (Dowdle et al., Plant J. 52: 673-89 (2007), Bulley et al., J. Exp. Bot. 60: 765-78 (2009)). Overexpression of the gene increases ascorbate contents in leaves of trangenic plants (Laing et al., Proc. Natl. Acad. Sci. U.S.A. 104: 9534-9 (2007)). Ascorbate can serve as alternative electron donor for photosystem II (Toth et al., Plant Physiol. 149: 1568-78 (2009)). Increased ascorbate content in plant would protect the plant against photooxidative damage of the photosystem, especially after heat stress (Bulley et al., J. Exp. Bot. 60: 765-78 (2009)).

### ARF6-Like (Auxin Responsive Factor) Polypeptides

[0012] Auxin response factors (ARFs) are transcription factors (Guilfoyle et al., 1998, Cellular and Molecular Life Sciences, Vol. 54, page 619) that bind with specificity to TGTCTC-containing auxin response elements (AuxREs) found in promoters of primary/early auxin response genes and mediate responses to the plant hormone auxin. It has been described in the prior art that ARFs are negatively regulated by the Aux/IAA proteins. In turn, auxin promotes degradation of Aux/IAA proteins that prevent the transcription factors of the ARF family from regulating auxin-responsive target genes (Weijers D., et al. 2005, EMBO J. Vol. 24, pages 1874-1885). In Arabidopsis, there are 29 Aux/IAA proteins that contain four conserved domains (Parry and Estelle, 2006, Curr Opin Cell Biol. April; 18(2):152-156). Domain I is responsible for repression (Tiwari et al. 2004, Plant Cell. February; 16(2):533-543.). Domain II contains a 13-amino acid degron motif that is responsible for the rapid degradation of the Aux/IAA proteins (Worley et al., 2000, Plant J. 2000 March; 21(6):553-562.; Ramos et al., 2001, Plant Cell. October; 13(10):2349-2360.). Domains III and IV mediate homo- and hetero-dimerization among the Aux/IAA proteins as well as between Aux/IAA and ARFs (Kim et al., 1997, Proc Natl Acad. Sci., October 28; 94(22):11786-11791; Ulmasov et al. 1997, Science. June 20; 276(5320):1865-1868; Ulmasov et al. 1997, Plant Cell. 1997 November; 9(11):1963-1971). The Aux/IAA proteins act as transcriptional repressors by interacting with ARFs through domains III and IV (Tiwari et al. 2001, Plant Cell. December; 13(12):2809-2822; Tiwari et al. 2004, Plant Cell. February; 16(2):533-543.). Hughes et al. have shown in 2008 (Plant Biotechnol. J., October; 6(8): pages 758-769) that the targeted expression of wild-type ARF2 in the sepals and petals of arf2-9 mutant flowers restores flower opening and dramatically increases seed set. The restored plants retain both enlarged integuments and increased seed size, reinforcing previous evidence that arf2 mutations increase seed weight through their effect on integuments.

### SUMMARY

### 1. VIM1 (Variant in Methylation 1)-Like Polypeptides

[0013] Surprisingly, it has now been found that modulating expression of a nucleic acid encoding a VIM1-like polypeptide as defined herein gives plants having enhanced yield-related traits, in particular increased plant height and increased seed yield relative to control plants.

[0014] According one embodiment, there is provided a method for improving yield-related traits as provided herein in plants relative to control plants, comprising modulating expression in a plant of a nucleic acid encoding a VIM1-like polypeptide as defined herein.

[0015] The section captions and headings in this specification are for convenience and reference purpose only and should not affect in any way the meaning or interpretation of this specification.

### 2. VTC2-Like (GDP-L-Galactose Phosphorylase) Polypeptides

[0016] Surprisingly, it has now been found that modulating expression of a nucleic acid encoding a VTC2-like polypeptide as defined herein gives plants having enhanced yield-related traits, in particular increased seed yield relative to control plants.

[0017] According one embodiment, there is provided a method for improving yield-related traits as provided herein in plants relative to control plants, comprising modulating expression in a plant of a nucleic acid encoding a VTC2-like polypeptide as defined herein.

[0018] The section captions and headings in this specification are for convenience and reference purpose only and should not affect in any way the meaning or interpretation of this specification.

### 3. DUF1685 Polypeptides

[0019] Surprisingly, it has now been found that modulating expression of a nucleic acid encoding a DUF1685 polypeptide as defined herein gives plants having enhanced yield-related traits, in particular increased yield, and more particularly increased seed yield, relative to control plants.

[0020] According one embodiment, there is provided a method for improving yield-related traits as provided herein in plants relative to control plants, comprising modulating expression in a plant of a nucleic acid encoding a DUF1685 polypeptide as defined herein.

[0021] The section captions and headings in this specification are for convenience and reference purpose only and should not affect in any way the meaning or interpretation of this specification.

### 4. ARF6-Like (Auxin Responsive Factor) Polypeptides

[0022] Surprisingly, it has now been found that modulating expression of a nucleic acid encoding a ARF6-like polypeptide as defined herein gives plants having enhanced yield-related traits, in particular increased yield, increased growth rate and biomass relative to control plants.

[0023] According one embodiment, there is provided a method for improving yield-related traits as provided herein in plants relative to control plants, comprising modulating expression in a plant of a nucleic acid encoding a ARF6-like polypeptide as defined herein.

[0024] The section captions and headings in this specification are for convenience and reference purpose only and should not affect in any way the meaning or interpretation of this specification.

### DEFINITIONS

[0025] The following definitions will be used throughout the present specification.

### Polypeptide(s)/Protein(s)

[0026] The terms “polypeptide” and “protein” are used interchangeably herein and refer to amino acids in a polymeric form of any length, linked together by peptide bonds.

### Polynucleotide(s)/Nucleic Acid(s)/Nucleic Acid Sequence(s)/Nucleotide Sequence(s)

[0027] The terms “polynucleotide(s)”, “nucleic acid sequence(s)”, “nucleotide sequence(s)”, “nucleic acid(s)”, “nucleic acid molecule” are used interchangeably herein and refer to nucleotides, either ribonucleotides or deoxyribonucleotides or a combination of both, in a polymeric unbranched form of any length.

Homologue(s) “Homologues” of a protein encompass peptides, oligopeptides, polypeptides, proteins and enzymes having amino acid substitutions, deletions and/or insertions relative to the unmodified protein in question and having similar biological and functional activity as the unmodified protein from which they are derived.

[0028] A deletion refers to removal of one or more amino acids from a protein.

[0029] An insertion refers to one or more amino acid residues being introduced into a predetermined site in a protein. Insertions may comprise N-terminal and/or C-terminal fusions as well as intra-sequence insertions of single or multiple amino acids. Generally, insertions within the amino acid sequence will be smaller than N- or C-terminal fusions, of the order of about 1 to 10 residues. Examples of N- or C-terminal fusion proteins or peptides include the binding domain or activation domain of a transcriptional activator as used in the yeast two-hybrid system, phage coat proteins, (histidine)-6-tag, glutathione S-transferase-tag, protein A, maltose-binding protein, dihydrofolate reductase, Tag•100 epitope, c-myc epitope, FLAG®-epitope, lacZ, CMP (calmodulin-binding peptide), HA epitope, protein C epitope and VSV epitope.

[0030] A substitution refers to replacement of amino acids of the protein with other amino acids having similar properties (such as similar hydrophobicity, hydrophilicity, antigenicity, propensity to form or break α-helical structures or β-sheet structures). Amino acid substitutions are typically of single residues, but may be clustered depending upon functional constraints placed upon the polypeptide and may range from 1 to 10 amino acids; insertions will usually be of the order of about 1 to 10 amino acid residues. The amino acid substitutions are preferably conservative amino acid substitutions. Conservative substitution tables are well known in the art (see for example Creighton (1984) Proteins. W.H. Freeman and Company (Eds) and Table 1 below).

TABLE 1
Examples of conserved amino acid substitutions

| Residue | Conservative Substitutions |
|---|---|
| Ala | Ser |
| Arg | Lys |
| Asn | Gln; His |
| Asp | Glu |
| Gln | Asn |
| Cys | Ser |
| Glu | Asp |
| Gly | Pro |
| His | Asn; Gln |
| Ile | Leu, Val |
| Leu | Ile; Val |
| Lys | Arg; Gln |
| Met | Leu; Ile |
| Phe | Met; Leu; Tyr |
| Ser | Thr; Gly |
| Thr | Ser; Val |
| Trp | Tyr |
| Tyr | Trp; Phe |
| Val | Ile; Leu |

[0031] Amino acid substitutions, deletions and/or insertions may readily be made using peptide synthetic techniques well known in the art, such as solid phase peptide synthesis and the like, or by recombinant DNA manipulation. Methods for the manipulation of DNA sequences to produce substitution, insertion or deletion variants of a protein are well known in the art. For example, techniques for making substitution mutations at predetermined sites in DNA are well known to those skilled in the art and include M13 mutagenesis, T7-Gen in vitro mutagenesis (USB, Cleveland, Ohio), QuickChange Site Directed mutagenesis (Stratagene, San Diego, Calif.), PCR-mediated site-directed mutagenesis or other site-directed mutagenesis protocols (see Current Protocols in Molecular Biology, John Wiley & Sons, N.Y. (1989 and yearly updates)).

### Derivatives

[0032] “Derivatives” include peptides, oligopeptides, polypeptides which may, compared to the amino acid sequence of the naturally-occurring form of the protein, such as the protein of interest, comprise substitutions of amino acids with non-naturally occurring amino acid residues, or additions of non-naturally occurring amino acid residues. “Derivatives” of a protein also encompass peptides, oligopeptides, polypeptides which comprise naturally occurring altered (glycosylated, acylated, prenylated, phosphorylated, myristoylated, sulphated etc.) or non-naturally altered amino acid residues compared to the amino acid sequence of a naturally-occurring form of the polypeptide. A derivative may also comprise one or more non-amino acid substituents or additions compared to the amino acid sequence from which it is derived, for example a reporter molecule or other ligand, covalently or non-covalently bound to the amino acid sequence, such as a reporter molecule which is bound to facilitate its detection, and non-naturally occurring amino acid residues relative to the amino acid sequence of a naturally-occurring protein. Furthermore, “derivatives” also include fusions of the naturally-occurring form of the protein with tagging peptides such as FLAG, HIS6 or thioredoxin (for a review of tagging peptides, see Terpe, Appl. Microbiol. Biotechnol. 60, 523-533, 2003).

### Orthologue(s)/Paralogue(s)

[0033] Orthologues and paralogues encompass evolutionary concepts used to describe the ancestral relationships of genes. Paralogues are genes within the same species that have originated through duplication of an ancestral gene; orthologues are genes from different organisms that have originated through speciation, and are also derived from a common ancestral gene.

### Domain, Motif/Consensus Sequence/Signature

[0034] The term “domain” refers to a set of amino acids conserved at specific positions along an alignment of sequences of evolutionarily related proteins. While amino acids at other positions can vary between homologues, amino acids that are highly conserved at specific positions indicate amino acids that are likely essential in the structure, stability or function of a protein. Identified by their high degree of conservation in aligned sequences of a family of protein homologues, they can be used as identifiers to determine if any polypeptide in question belongs to a previously identified polypeptide family.

[0035] The term “motif” or “consensus sequence” or “signature” refers to a short conserved region in the sequence of evolutionarily related proteins. Motifs are frequently highly conserved parts of domains, but may also include only part of the domain, or be located outside of conserved domain (if all of the amino acids of the motif fall outside of a defined domain).

[0036] Specialist databases exist for the identification of domains, for example, SMART (Schultz et al. (1998) Proc. Natl. Acad. Sci. USA 95, 5857-5864; Letunic et al. (2002) Nucleic Acids Res 30, 242-244), InterPro (Mulder et al., (2003) Nucl. Acids. Res. 31, 315-318), Prosite (Bucher and Bairoch (1994), A generalized profile syntax for biomolecular sequences motifs and its function in automatic sequence interpretation. (In) ISMB-94; Proceedings 2nd International Conference on Intelligent Systems for Molecular Biology. Altman R., Brutlag D., Karp P., Lathrop R., Searls D., Eds., pp 53-61, AAAI Press, Menlo Park; Hulo et al., Nucl. Acids. Res. 32:D134-D137, (2004)), or Pfam (Bateman et al., Nucleic Acids Research 30(1): 276-280 (2002)). A set of tools for in silico analysis of protein sequences is available on the ExPASy proteomics server (Swiss Institute of Bioinformatics (Gasteiger et al., ExPASy: the proteomics server for in-depth protein knowledge and analysis, Nucleic Acids Res. 31:3784-3788 (2003)). Domains or motifs may also be identified using routine techniques, such as by sequence alignment.

[0037] Methods for the alignment of sequences for comparison are well known in the art, such methods include GAP, BESTFIT, BLAST, FASTA and TFASTA. GAP uses the algorithm of Needleman and Wunsch ((1970) J Mol Biol 48: 443-453) to find the global (i.e. spanning the complete sequences) alignment of two sequences that maximizes the number of matches and minimizes the number of gaps. The BLAST algorithm (Altschul et al. (1990) J Mol Biol 215: 403-10) calculates percent sequence identity and performs a statistical analysis of the similarity between the two sequences. The software for performing BLAST analysis is publicly available through the National Centre for Biotechnology Information (NCBI). Homologues may readily be identified using, for example, the ClustalW multiple sequence alignment algorithm (version 1.83), with the default pairwise alignment parameters, and a scoring method in percentage. Global percentages of similarity and identity may also be determined using one of the methods available in the MatGAT software package (Campanella et al., BMC Bioinformatics. 2003 Jul. 10; 4:29. MatGAT: an application that generates similarity/identity matrices using protein or DNA sequences.). Minor manual editing may be performed to optimise alignment between conserved motifs, as would be apparent to a person skilled in the art. Furthermore, instead of using full-length sequences for the identification of homologues, specific domains may also be used. The sequence identity values may be determined over the entire nucleic acid or amino acid sequence or over selected domains or conserved motif(s), using the programs mentioned above using the default parameters. For local alignments, the Smith-Waterman algorithm is particularly useful (Smith T F, Waterman M S (1981) J. Mol. Biol 147(1); 195-7).

### Reciprocal BLAST

[0038] Typically, this involves a first BLAST involving BLASTing a query sequence (for example using any of the sequences listed in the Tables of the Examples section) against any sequence database, such as the publicly available NCBI database. BLASTN or TBLASTX (using standard default values) are generally used when starting from a nucleotide sequence, and BLASTP or TBLASTN (using standard default values) when starting from a protein sequence. The BLAST results may optionally be filtered. The full-length sequences of either the filtered results or non-filtered results are then BLASTed back (second BLAST) against sequences from the organism from which the query sequence is derived. The results of the first and second BLASTs are then compared. A paralogue is identified if a high-ranking hit from the first blast is from the same species as from which the query sequence is derived, a BLAST back then ideally results in the query sequence amongst the highest hits; an orthologue is identified if a high-ranking hit in the first BLAST is not from the same species as from which the query sequence is derived, and preferably results upon BLAST back in the query sequence being among the highest hits.

[0039] High-ranking hits are those having a low E-value. The lower the E-value, the more significant the score (or in other words the lower the chance that the hit was found by chance). Computation of the E-value is well known in the art. In addition to E-values, comparisons are also scored by percentage identity. Percentage identity refers to the number of identical nucleotides (or amino acids) between the two compared nucleic acid (or polypeptide) sequences over a particular length. In the case of large families, ClustalW may be used, followed by a neighbour joining tree, to help visualize clustering of related genes and to identify orthologues and paralogues.

### Hybridisation

[0040] The term “hybridisation” as defined herein is a process wherein substantially homologous complementary nucleotide sequences anneal to each other. The hybridisation process can occur entirely in solution, i.e. both complementary nucleic acids are in solution. The hybridisation process can also occur with one of the complementary nucleic acids immobilised to a matrix such as magnetic beads, Sepharose beads or any other resin. The hybridisation process can furthermore occur with one of the complementary nucleic acids immobilised to a solid support such as a nitro-cellulose or nylon membrane or immobilised by e.g. photolithography to, for example, a siliceous glass support (the latter known as nucleic acid arrays or microarrays or as nucleic acid chips). In order to allow hybridisation to occur, the nucleic acid molecules are generally thermally or chemically denatured to melt a double strand into two single strands and/or to remove hairpins or other secondary structures from single stranded nucleic acids.

[0041] The term “stringency” refers to the conditions under which a hybridisation takes place. The stringency of hybridisation is influenced by conditions such as temperature, salt concentration, ionic strength and hybridisation buffer composition. Generally, low stringency conditions are selected to be about 30° C. lower than the thermal melting point (Tₘ) for the specific sequence at a defined ionic strength and pH. Medium stringency conditions are when the temperature is 20° C. below Tₘ, and high stringency conditions are when the temperature is 10° C. below Tₘ. High stringency hybridisation conditions are typically used for isolating hybridising sequences that have high sequence similarity to the target nucleic acid sequence. However, nucleic acids may deviate in sequence and still encode a substantially identical polypeptide, due to the degeneracy of the genetic code. Therefore medium stringency hybridisation conditions may sometimes be needed to identify such nucleic acid molecules.

[0042] The Tₘ is the temperature under defined ionic strength and pH, at which 50% of the target sequence hybridises to a perfectly matched probe. The Tₘ is dependent upon the solution conditions and the base composition and length of the probe. For example, longer sequences hybridise specifically at higher temperatures. The maximum rate of hybridisation is obtained from about 16° C. up to 32° C. below Tₘ. The presence of monovalent cations in the hybridisation solution reduce the electrostatic repulsion between the two nucleic acid strands thereby promoting hybrid formation; this effect is visible for sodium concentrations of up to 0.4M (for higher concentrations, this effect may be ignored). Formamide reduces the melting temperature of DNA-DNA and DNA-RNA duplexes with 0.6 to 0.7° C. for each percent formamide, and addition of 50% formamide allows hybridisation to be performed at 30 to 45° C., though the rate of hybridisation will be lowered. Base pair mismatches reduce the hybridisation rate and the thermal stability of the duplexes. On average and for large probes, the Tm decreases about 1° C. per % base mismatch. The Tₘ may be calculated using the following equations, depending on the types of hybrids:

1) DNA-DNA hybrids (Meinkoth and Wahl, Anal. Biochem., 138: 267-284, 1984):

Tₘ=81.5° C.+16.6×log₁₀[Na⁺]^{a}+0.41×% [G/C^{b}]−500×[L^{c}]⁻¹−0.61×% formamide

2) DNA-RNA or RNA-RNA hybrids:

Tₘ=79.8° C.+18.5(log₁₀[Na⁺]^{a})+0.58(% G/C^{b})+11.8(% G/C^{b})²−820/L^{c}

3) oligo-DNA or oligo-RNAs hybrids:

For <20 nucleotides: Tₘ=2(lₙ)

For 20-35 nucleotides: Tₘ=22+1.46(lₙ)

^{a} or for other monovalent cation, but only accurate in the 0.01-0.4 M range.
^{b} only accurate for % GC in the 30% to 75% range.
^{c} L=length of duplex in base pairs.
^{d} oligo, oligonucleotide; lₙ,=effective length of primer=2×(no. of G/C)+(no. of A/T).

[0043] Non-specific binding may be controlled using any one of a number of known techniques such as, for example, blocking the membrane with protein containing solutions, additions of heterologous RNA, DNA, and SDS to the hybridisation buffer, and treatment with Rnase. For non-homologous probes, a series of hybridizations may be performed by varying one of (i) progressively lowering the annealing temperature (for example from 68° C. to 42° C.) or (ii) progressively lowering the formamide concentration (for example from 50% to 0%). The skilled artisan is aware of various parameters which may be altered during hybridisation and which will either maintain or change the stringency conditions.

[0044] Besides the hybridisation conditions, specificity of hybridisation typically also depends on the function of post-hybridisation washes. To remove background resulting from non-specific hybridisation, samples are washed with dilute salt solutions. Critical factors of such washes include the ionic strength and temperature of the final wash solution: the lower the salt concentration and the higher the wash temperature, the higher the stringency of the wash. Wash conditions are typically performed at or below hybridisation stringency. A positive hybridisation gives a signal that is at least twice of that of the background. Generally, suitable stringent conditions for nucleic acid hybridisation assays or gene amplification detection procedures are as set forth above. More or less stringent conditions may also be selected. The skilled artisan is aware of various parameters which may be altered during washing and which will either maintain or change the stringency conditions.

[0045] For example, typical high stringency hybridisation conditions for DNA hybrids longer than 50 nucleotides encompass hybridisation at 65° C. in 1×SSC or at 42° C. in 1×SSC and 50% formamide, followed by washing at 65° C. in 0.3×SSC. Examples of medium stringency hybridisation conditions for DNA hybrids longer than 50 nucleotides encompass hybridisation at 50° C. in 4×SSC or at 40° C. in 6×SSC and 50% formamide, followed by washing at 50° C. in 2×SSC. The length of the hybrid is the anticipated length for the hybridising nucleic acid. When nucleic acids of known sequence are hybridised, the hybrid length may be determined by aligning the sequences and identifying the conserved regions described herein. 1×SSC is 0.15M NaCl and 15 mM sodium citrate; the hybridisation solution and wash solutions may additionally include 5×Denhardt's reagent, 0.5-1.0% SDS, 100 μg/ml denatured, fragmented salmon sperm DNA, 0.5% sodium pyrophosphate.

[0046] For the purposes of defining the level of stringency, reference can be made to Sambrook et al. (2001) Molecular Cloning: a laboratory manual, 3rd Edition, Cold Spring Harbor Laboratory Press, CSH, New York or to Current Protocols in Molecular Biology, John Wiley & Sons, N.Y. (1989 and yearly updates).

### Splice Variant

[0047] The term “splice variant” as used herein encompasses variants of a nucleic acid sequence in which selected introns and/or exons have been excised, replaced, displaced or added, or in which introns have been shortened or lengthened. Such variants will be ones in which the biological activity of the protein is substantially retained; this may be achieved by selectively retaining functional segments of the protein. Such splice variants may be found in nature or may be manmade. Methods for predicting and isolating such splice variants are well known in the art (see for example Foissac and Schiex (2005) BMC Bioinformatics 6: 25).

### Allelic Variant

[0048] Alleles or allelic variants are alternative forms of a given gene, located at the same chromosomal position. Allelic variants encompass Single Nucleotide Polymorphisms (SNPs), as well as Small Insertion/Deletion Polymorphisms (INDELs). The size of INDELs is usually less than 100 bp. SNPs and INDELs form the largest set of sequence variants in naturally occurring polymorphic strains of most organisms.

### Endogenous Gene

[0049] Reference herein to an “endogenous” gene not only refers to the gene in question as found in a plant in its natural form (i.e., without there being any human intervention), but also refers to that same gene (or a substantially homologous nucleic acid/gene) in an isolated form subsequently (re)introduced into a plant (a transgene). For example, a transgenic plant containing such a transgene may encounter a substantial reduction of the transgene expression and/or substantial reduction of expression of the endogenous gene. The isolated gene may be isolated from an organism or may be manmade, for example by chemical synthesis.

### Gene Shuffling/Directed Evolution

[0050] Gene shuffling or directed evolution consists of iterations of DNA shuffling followed by appropriate screening and/or selection to generate variants of nucleic acids or portions thereof encoding proteins having a modified biological activity (Castle et al., (2004) Science 304(5674): 1151-4; U.S. Pat. Nos. 5,811,238 and 6,395,547).

### Construct

[0051] Artificial DNA (such as but, not limited to plasmids or viral DNA) capable of replication in a host cell and used for introduction of a DNA sequence of interest into a host cell or host organism. Host cells of the invention may be any cell selected from bacterial cells, such as Escherichia coli or Agrobacterium species cells, yeast cells, fungal, algal or cyanobacterial cells or plant cells. The skilled artisan is well aware of the genetic elements that must be present on the genetic construct in order to successfully transform, select and propagate host cells containing the sequence of interest. The sequence of interest is operably linked to one or more control sequences (at least to a promoter) as described herein. Additional regulatory elements may include transcriptional as well as translational enhancers. Those skilled in the art will be aware of terminator and enhancer sequences that may be suitable for use in performing the invention. An intron sequence may also be added to the 5′ untranslated region (UTR) or in the coding sequence to increase the amount of the mature message that accumulates in the cytosol, as described in the definitions section. Other control sequences (besides promoter, enhancer, silencer, intron sequences, 3′UTR and/or 5′UTR regions) may be protein and/or RNA stabilizing elements. Such sequences would be known or may readily be obtained by a person skilled in the art.

[0052] The genetic constructs of the invention may further include an origin of replication sequence that is required for maintenance and/or replication in a specific cell type. One example is when a genetic construct is required to be maintained in a bacterial cell as an episomal genetic element (e.g. plasmid or cosmid molecule). Preferred origins of replication include, but are not limited to, the f1-ori and colE1.

[0053] For the detection of the successful transfer of the nucleic acid sequences as used in the methods of the invention and/or selection of transgenic plants comprising these nucleic acids, it is advantageous to use marker genes (or reporter genes). Therefore, the genetic construct may optionally comprise a selectable marker gene. Selectable markers are described in more detail in the “definitions” section herein. The marker genes may be removed or excised from the transgenic cell once they are no longer needed. Techniques for marker removal are known in the art, useful techniques are described above in the definitions section.

### Regulatory Element/Control Sequence/Promoter

[0054] The terms “regulatory element”, “control sequence” and “promoter” are all used interchangeably herein and are to be taken in a broad context to refer to regulatory nucleic acid sequences capable of effecting expression of the sequences to which they are ligated. The term “promoter” typically refers to a nucleic acid control sequence located upstream from the transcriptional start of a gene and which is involved in recognising and binding of RNA polymerase and other proteins, thereby directing transcription of an operably linked nucleic acid. Encompassed by the aforementioned terms are transcriptional regulatory sequences derived from a classical eukaryotic genomic gene (including the TATA box which is required for accurate transcription initiation, with or without a CCAAT box sequence) and additional regulatory elements (i.e. upstream activating sequences, enhancers and silencers) which alter gene expression in response to developmental and/or external stimuli, or in a tissue-specific manner. Also included within the term is a transcriptional regulatory sequence of a classical prokaryotic gene, in which case it may include a −35 box sequence and/or −10 box transcriptional regulatory sequences. The term “regulatory element” also encompasses a synthetic fusion molecule or derivative that confers, activates or enhances expression of a nucleic acid molecule in a cell, tissue or organ.

[0055] A “plant promoter” comprises regulatory elements, which mediate the expression of a coding sequence segment in plant cells. Accordingly, a plant promoter need not be of plant origin, but may originate from viruses or micro-organisms, for example from viruses which attack plant cells. The “plant promoter” can also originate from a plant cell, e.g. from the plant which is transformed with the nucleic acid sequence to be expressed in the inventive process and described herein. This also applies to other “plant” regulatory signals, such as “plant” terminators. The promoters upstream of the nucleotide sequences useful in the methods of the present invention can be modified by one or more nucleotide substitution(s), insertion(s) and/or deletion(s) without interfering with the functionality or activity of either the promoters, the open reading frame (ORF) or the 3′-regulatory region such as terminators or other 3′ regulatory regions which are located away from the ORF. It is furthermore possible that the activity of the promoters is increased by modification of their sequence, or that they are replaced completely by more active promoters, even promoters from heterologous organisms. For expression in plants, the nucleic acid molecule must, as described above, be linked operably to or comprise a suitable promoter which expresses the gene at the right point in time and with the required spatial expression pattern.

[0056] For the identification of functionally equivalent promoters, the promoter strength and/or expression pattern of a candidate promoter may be analysed for example by operably linking the promoter to a reporter gene and assaying the expression level and pattern of the reporter gene in various tissues of the plant. Suitable well-known reporter genes include for example beta-glucuronidase or beta-galactosidase. The promoter activity is assayed by measuring the enzymatic activity of the beta-glucuronidase or beta-galactosidase. The promoter strength and/or expression pattern may then be compared to that of a reference promoter (such as the one used in the methods of the present invention). Alternatively, promoter strength may be assayed by quantifying mRNA levels or by comparing mRNA levels of the nucleic acid used in the methods of the present invention, with mRNA levels of housekeeping genes such as 18S rRNA, using methods known in the art, such as Northern blotting with densitometric analysis of autoradiograms, quantitative real-time PCR or RT-PCR (Heid et al., 1996 Genome Methods 6: 986-994). Generally by “weak promoter” is intended a promoter that drives expression of a coding sequence at a low level. By “low level” is intended at levels of about 1/10,000 transcripts to about 1/100,000 transcripts, to about 1/500,0000 transcripts per cell. Conversely, a “strong promoter” drives expression of a coding sequence at high level, or at about 1/10 transcripts to about 1/100 transcripts to about 1/1000 transcripts per cell. Generally, by “medium strength promoter” is intended a promoter that drives expression of a coding sequence at a lower level than a strong promoter, in particular at a level that is in all instances below that obtained when under the control of a 35S CaMV promoter.

### Operably Linked

[0057] The term “operably linked” as used herein refers to a functional linkage between the promoter sequence and the gene of interest, such that the promoter sequence is able to initiate transcription of the gene of interest.

### Constitutive Promoter

[0058] A “constitutive promoter” refers to a promoter that is transcriptionally active during most, but not necessarily all, phases of growth and development and under most environmental conditions, in at least one cell, tissue or organ. Table 2a below gives examples of constitutive promoters.

TABLE 2a
Examples of constitutive promoters

| Gene Source | Reference |
|---|---|
| Actin | McElroy et al, Plant Cell, 2: 163-171, 1990 |
| HMGP | WO 2004/070039 |
| CAMV 35S | Odell et al, Nature, 313: 810-812, 1985 |
| CaMV 19S | Nilsson et al., Physiol. Plant. 100: 456-462, 1997 |
| GOS2 | de Pater et al, Plant J Nov; 2(6): 837-44, 1992, |
| | WO 2004/065596 |
| Ubiquitin | Christensen et al, Plant Mol. Biol. 18: 675-689, 1992 |
| Rice cyclophilin | Buchholz et al, Plant Mol Biol. 25(5): 837-43, 1994 |
| Maize H3 histone | Lepetit et al, Mol. Gen. Genet. 231: 276-285, 1992 |
| Alfalfa H3 | Wu et al. Plant Mol. Biol. 11: 641-649, 1988 |
| histone | |
| Actin 2 | An et al, Plant J. 10(1); 107-121, 1996 |
| 34S FMV | Sanger et al., Plant. Mol. Biol., 14, 1990: 433-443 |
| Rubisco small | U.S. Pat. No. 4,962,028 |
| subunit | |
| OCS | Leisner (1988) Proc Natl Acad Sci USA 85(5): 2553 |
| SAD1 | Jain et al., Crop Science, 39 (6), 1999: 1696 |
| SAD2 | Jain et al., Crop Science, 39 (6), 1999: 1696 |
| nos | Shaw et al. (1984) Nucleic Acids Res. 12(20): |
| | 7831-7846 |
| V-ATPase | WO 01/14572 |
| Super promoter | WO 95/14098 |
| G-box proteins | WO 94/12015 |

### Ubiquitous Promoter

[0059] A ubiquitous promoter is active in substantially all tissues or cells of an organism.

### Developmentally-Regulated Promoter

[0060] A developmentally-regulated promoter is active during certain developmental stages or in parts of the plant that undergo developmental changes.

### Inducible Promoter

[0061] An inducible promoter has induced or increased transcription initiation in response to a chemical (for a review see Gatz 1997, Annu. Rev. Plant Physiol. Plant Mol. Biol., 48:89-108), environmental or physical stimulus, or may be “stress-inducible”, i.e. activated when a plant is exposed to various stress conditions, or a “pathogen-inducible” i.e. activated when a plant is exposed to exposure to various pathogens.

### Organ-Specific/Tissue-Specific Promoter

[0062] An organ-specific or tissue-specific promoter is one that is capable of preferentially initiating transcription in certain organs or tissues, such as the leaves, roots, seed tissue etc. For example, a “root-specific promoter” is a promoter that is transcriptionally active predominantly in plant roots, substantially to the exclusion of any other parts of a plant, whilst still allowing for any leaky expression in these other plant parts. Promoters able to initiate transcription in certain cells only are referred to herein as “cell-specific”.

[0063] Examples of root-specific promoters are listed in Table 2b below:

TABLE 2b
Examples of root-specific promoters

| Gene Source | Reference |
|---|---|
| RCc3 | Plant Mol Biol. 1995 January; 27(2): 237-48 |
| Arabidopsis PHT1 | Koyama et al. J Biosci Bioeng. 2005 January; |
| | 99(1): 38-42.; Mudge et al. (2002, Plant J. |
| | 31: 341) |
| Medicago phosphate | Xiao et al., 2006, Plant Biol (Stuttg). 2006 |
| transporter | July; 8(4): 439-49 |
| Arabidopsis Pyk10 | Nitz et al. (2001) Plant Sci 161(2): 337-346 |
| root-expressible genes | Tingey et al., EMBO J. 6: 1, 1987. |
| tobacco auxin- | Van der Zaal et al., Plant Mol. Biol. 16, |
| inducible gene | 983, 1991. |
| β-tubulin | Oppenheimer, et al., Gene 63: 87, 1988. |
| tobacco root- | Conkling, et al., Plant Physiol. 93: 1203, 1990. |
| specific genes | |
| B. napus G1-3b gene | U.S. Pat. No. 5,401,836 |
| SbPRP1 | Suzuki et al., Plant Mol. Biol. 21: 109-119, |
| | 1993. |
| LRX1 | Baumberger et al. 2001, Genes & Dev. 15: 1128 |
| BTG-26 Brassica | US 20050044585 |
| napus | |
| LeAMT1 (tomato) | Lauter et al. (1996, PNAS 3: 8139) |
| The LeNRT1-1 | Lauter et al. (1996, PNAS 3: 8139) |
| (tomato) | |
| class I patatin | Liu et al., Plant Mol. Biol. 17 (6): 1139-1154 |
| gene (potato) | |
| KDC1 (Daucus | Downey et al. (2000, J. Biol. Chem. 275: 39420) |
| carota) | |
| TobRB7 gene | W Song (1997) PhD Thesis, North Carolina State |
| | University, Raleigh, NC USA |
| OsRAB5a (rice) | Wang et al. 2002, Plant Sci. 163: 273 |
| ALF5 (Arabidopsis) | Diener et al. (2001, Plant Cell 13: 1625) |
| NRT2; 1Np (N. | Quesada et al. (1997, Plant Mol. Biol. 34: 265) |
| plumbaginifolia) | |

[0064] A seed-specific promoter is transcriptionally active predominantly in seed tissue, but not necessarily exclusively in seed tissue (in cases of leaky expression). The seed-specific promoter may be active during seed development and/or during germination. The seed specific promoter may be endosperm/aleurone/embryo specific. Examples of seed-specific promoters (endosperm/aleurone/embryo specific) are shown in Table 2c to Table 2f below. Further examples of seed-specific promoters are given in Qing Qu and Takaiwa (Plant Biotechnol. J. 2, 113-125, 2004), which disclosure is incorporated by reference herein as if fully set forth.

TABLE 2c
Examples of seed-specific promoters

| Gene source | Reference |
|---|---|
| seed-specific genes | Simon et al., Plant Mol. Biol. 5: 191, 1985; |
| | Scofield et al., J. Biol. Chem. 262: 12202, 1987.; |
| | Baszczynski et al., Plant Mol. Biol. 14: 633, 1990. |
| Brazil Nut albumin | Pearson et al., Plant Mol. Biol. 18: 235-245, 1992. |
| legumin | Ellis et al., Plant Mol. Biol. 10: 203-214, 1988. |
| glutelin (rice) | Takaiwa et al., Mol. Gen. Genet. 208: 15-22, 1986; |
| | Takaiwa et al., FEBS Letts. 221: 43-47, 1987. |
| zein | Matzke et al Plant Mol Biol, 14(3): 323-32 1990 |
| napA | Stalberg et al, Planta 199: 515-519, 1996. |
| wheat LMW and HMW | Mol Gen Genet 216: 81-90, 1989; NAR 17: 461-2, 1989 |
| glutenin-1 | |
| wheat SPA | Albani et al, Plant Cell, 9: 171-184, 1997 |
| wheat α, β, γ-gliadins | EMBO J. 3: 1409-15, 1984 |
| barley Itr1 promoter | Diaz et al. (1995) Mol Gen Genet 248(5): 592-8 |
| barley B1, C, D, hordein | Theor Appl Gen 98: 1253-62, 1999; Plant J 4: 343-55, |
| | 1993; Mol Gen Genet 250: 750-60, 1996 |
| barley DOF | Mena et al, The Plant Journal, 116(1): 53-62, 1998 |
| blz2 | EP99106056.7 |
| synthetic promoter | Vicente-Carbajosa et al., Plant J. 13: 629-640, 1998. |
| rice prolamin NRP33 | Wu et al, Plant Cell Physiology 39(8) 885-889, 1998 |
| rice a-globulin Glb-1 | Wu et al, Plant Cell Physiology 39(8) 885-889, 1998 |
| rice OSH1 | Sato et al, Proc. Natl. Acad. Sci. USA, 93: 8117-8122, |
| | 1996 |
| rice α-globulin REB/OHP-1 | Nakase et al. Plant Mol. Biol. 33: 513-522, 1997 |
| rice ADP-glucose pyrophos- | Trans Res 6: 157-68, 1997 |
| phorylase | |
| maize ESR gene family | Plant J 12: 235-46, 1997 |
| sorghum α-kafirin | DeRose et al., Plant Mol. Biol 32: 1029-35, 1996 |
| KNOX | Postma-Haarsma et al, Plant Mol. Biol. 39: 257-71, 1999 |
| rice oleosin | Wu et al, J. Biochem. 123: 386, 1998 |
| sunflower oleosin | Cummins et al., Plant Mol. Biol. 19: 873-876, 1992 |
| PRO0117, putative rice 40S | WO 2004/070039 |
| ribosomal protein | |
| PRO0136, rice alanine | unpublished |
| aminotransferase | |
| PRO0147, trypsin inhibitor | unpublished |
| ITR1 (barley) | |
| PRO0151, rice WSI18 | WO 2004/070039 |
| PRO0175, rice RAB21 | WO 2004/070039 |
| PRO005 | WO 2004/070039 |
| PRO0095 | WO 2004/070039 |
| α-amylase (Amy32b) | Lanahan et al, Plant Cell 4: 203-211, 1992; Skriver et al, |
| | Proc Natl Acad Sci USA 88: 7266-7270, 1991 |
| cathepsin β-like gene | Cejudo et al, Plant Mol Biol 20: 849-856, 1992 |
| Barley Ltp2 | Kalla et al., Plant J. 6: 849-60, 1994 |
| Chi26 | Leah et al., Plant J. 4: 579-89, 1994 |
| Maize B-Peru | Selinger et al., Genetics 149; 1125-38, 1998 |

TABLE 2d
examples of endosperm-specific promoters

| Gene source | Reference |
|---|---|
| glutelin (rice) | Takaiwa et al. (1986) Mol Gen Genet 208: 15-22; |
| | Takaiwa et al. (1987) FEBS Letts. 221: 43-47 |
| zein | Matzke et al., (1990) Plant Mol Biol 14(3): 323-32 |
| wheat LMW | Colot et al. (1989) Mol Gen Genet 216: 81-90, |
| and HMW | Anderson et al. (1989) NAR 17: 461-2 |
| glutenin-1 | |
| wheat SPA | Albani et al. (1997) Plant Cell 9: 171-184 |
| wheat gliadins | Rafalski et al. (1984) EMBO 3: 1409-15 |
| barley Itr1 | Diaz et al. (1995) Mol Gen Genet 248(5): 592-8 |
| promoter | |
| barley B1, C, D, | Cho et al. (1999) Theor Appl Genet 98: 1253-62; |
| hordein | Muller et al. (1993) Plant J 4: 343-55; |
| | Sorenson et al. (1996) Mol Gen Genet 250: 750-60 |
| barley DOF | Mena et al, (1998) Plant J 116(1): 53-62 |
| blz2 | Onate et al. (1999) J Biol Chem 274(14): 9175-82 |
| synthetic promoter | Vicente-Carbajosa et al. (1998) Plant J 13: 629-640 |
| rice prolamin | Wu et al, (1998) Plant Cell Physiol 39(8) 885-889 |
| NRP33 | |
| rice globulin | Wu et al. (1998) Plant Cell Physiol 39(8) 885-889 |
| Glb-1 | |
| rice globulin | Nakase et al. (1997) Plant Molec Biol 33: 513-522 |
| REB/OHP-1 | |
| rice ADP-glucose | Russell et al. (1997) Trans Res 6: 157-68 |
| pyrophosphorylase | |
| maize ESR | Opsahl-Ferstad et al. (1997) Plant J 12: 235-46 |
| gene family | |
| sorghum kafirin | DeRose et al. (1996) Plant Mol Biol 32: 1029-35 |

TABLE 2e
Examples of embryo specific promoters:

| Gene source | Reference |
|---|---|
| rice OSH1 | Sato et al, Proc. Natl. Acad. Sci. USA, 93: 8117-8122, |
| | 1996 |
| KNOX | Postma-Haarsma et al, Plant Mol. Biol. 39: 257-71, 1999 |
| PRO0151 | WO 2004/070039 |
| PRO0175 | WO 2004/070039 |
| PRO005 | WO 2004/070039 |
| PRO0095 | WO 2004/070039 |

TABLE 2f
Examples of aleurone-specific promoters:

| Gene source | Reference |
|---|---|
| α-amylase | Lanahan et al, Plant Cell 4: 203-211, 1992; |
| (Amy32b) | Skriver et al, Proc Natl Acad Sci USA 88: |
| | 7266-7270, 1991 |
| cathepsin β-like gene | Cejudo et al, Plant Mol Biol 20: 849-856, 1992 |
| Barley Ltp2 | Kalla et al., Plant J. 6: 849-60, 1994 |
| Chi26 | Leah et al., Plant J. 4: 579-89, 1994 |
| Maize B-Peru | Selinger et al., Genetics 149; 1125-38, 1998 |

[0065] A green tissue-specific promoter as defined herein is a promoter that is transcriptionally active predominantly in green tissue, substantially to the exclusion of any other parts of a plant, whilst still allowing for any leaky expression in these other plant parts.

[0066] Examples of green tissue-specific promoters which may be used to perform the methods of the invention are shown in Table 2g below.

TABLE 2g
Examples of green tissue-specific promoters

| Gene | Expression | Reference |
|---|---|---|
| Maize Ortho- | Leaf specific | Fukavama et al., Plant Physiol. |
| phosphate dikinase | | 2001 November; 127(3): |
| | | 1136-46 |
| Maize | Leaf specific | Kausch et al., Plant Mol Biol. |
| Phosphoenolpyruvate | | 2001 January; 45(1): 1-15 |
| carboxylase | | |
| Rice | Leaf specific | Lin et al., 2004 DNA Seq. 2004 |
| Phosphoenolpyruvate | | August; 15(4): 269-76 |
| carboxylase | | |
| Rice small subunit | Leaf specific | Nomura et al., Plant Mol Biol. |
| Rubisco | | 2000 September; 44(1): 99-106 |
| rice beta expansin | Shoot specific | WO 2004/070039 |
| EXBP9 | | |
| Pigeonpea small | Leaf specific | Panguluri et al., Indian J Exp |
| subunit Rubisco | | Biol. 2005 April; 43(4): 369-72 |
| Pea RBCS3A | Leaf specific | |

[0067] Another example of a tissue-specific promoter is a meristem-specific promoter, which is transcriptionally active predominantly in meristematic tissue, substantially to the exclusion of any other parts of a plant, whilst still allowing for any leaky expression in these other plant parts. Examples of green meristem-specific promoters which may be used to perform the methods of the invention are shown in Table 2h below.

TABLE 2h
Examples of meristem-specific promoters

| Gene source | Expression pattern | Reference |
|---|---|---|
| rice OSH1 | Shoot apical meristem, | Sato et al. (1996) Proc. Natl. |
| | from embryo globular | Acad. Sci. USA, 93: 8117-8122 |
| | stage to seedling | |
| | stage | |
| Rice | Meristem specific | BAD87835.1 |
| metallothionein | | |
| WAK1 & | Shoot and root apical | Wagner & Kohorn (2001) Plant |
| WAK 2 | meristems, and in | Cell 13(2): 303-318 |
| | expanding leaves and | |
| | sepals | |

### Terminator

[0068] The term “terminator” encompasses a control sequence which is a DNA sequence at the end of a transcriptional unit which signals 3′ processing and polyadenylation of a primary transcript and termination of transcription. The terminator can be derived from the natural gene, from a variety of other plant genes, or from T-DNA. The terminator to be added may be derived from, for example, the nopaline synthase or octopine synthase genes, or alternatively from another plant gene, or less preferably from any other eukaryotic gene.

### Selectable Marker (Gene)/Reporter Gene

[0069] “Selectable marker”, “selectable marker gene” or “reporter gene” includes any gene that confers a phenotype on a cell in which it is expressed to facilitate the identification and/or selection of cells that are transfected or transformed with a nucleic acid construct of the invention. These marker genes enable the identification of a successful transfer of the nucleic acid molecules via a series of different principles. Suitable markers may be selected from markers that confer antibiotic or herbicide resistance, that introduce a new metabolic trait or that allow visual selection. Examples of selectable marker genes include genes conferring resistance to antibiotics (such as nptII that phosphorylates neomycin and kanamycin, or hpt, phosphorylating hygromycin, or genes conferring resistance to, for example, bleomycin, streptomycin, tetracyclin, chloramphenicol, ampicillin, gentamycin, geneticin (G418), spectinomycin or blasticidin), to herbicides (for example bar which provides resistance to Basta®; aroA or gox providing resistance against glyphosate, or the genes conferring resistance to, for example, imidazolinone, phosphinothricin or sulfonylurea), or genes that provide a metabolic trait (such as manA that allows plants to use mannose as sole carbon source or xylose isomerase for the utilisation of xylose, or antinutritive markers such as the resistance to 2-deoxyglucose). Expression of visual marker genes results in the formation of colour (for example β-glucuronidase, GUS or β-galactosidase with its coloured substrates, for example X-Gal), luminescence (such as the luciferin/luceferase system) or fluorescence (Green Fluorescent Protein, GFP, and derivatives thereof). This list represents only a small number of possible markers. The skilled worker is familiar with such markers. Different markers are preferred, depending on the organism and the selection method.

[0070] It is known that upon stable or transient integration of nucleic acids into plant cells, only a minority of the cells takes up the foreign DNA and, if desired, integrates it into its genome, depending on the expression vector used and the transfection technique used. To identify and select these integrants, a gene coding for a selectable marker (such as the ones described above) is usually introduced into the host cells together with the gene of interest. These markers can for example be used in mutants in which these genes are not functional by, for example, deletion by conventional methods. Furthermore, nucleic acid molecules encoding a selectable marker can be introduced into a host cell on the same vector that comprises the sequence encoding the polypeptides of the invention or used in the methods of the invention, or else in a separate vector. Cells which have been stably transfected with the introduced nucleic acid can be identified for example by selection (for example, cells which have integrated the selectable marker survive whereas the other cells die).

[0071] Since the marker genes, particularly genes for resistance to antibiotics and herbicides, are no longer required or are undesired in the transgenic host cell once the nucleic acids have been introduced successfully, the process according to the invention for introducing the nucleic acids advantageously employs techniques which enable the removal or excision of these marker genes. One such a method is what is known as co-transformation. The co-transformation method employs two vectors simultaneously for the transformation, one vector bearing the nucleic acid according to the invention and a second bearing the marker gene(s). A large proportion of transformants receives or, in the case of plants, comprises (up to 40% or more of the transformants), both vectors. In case of transformation with Agrobacteria, the transformants usually receive only a part of the vector, i.e. the sequence flanked by the T-DNA, which usually represents the expression cassette. The marker genes can subsequently be removed from the transformed plant by performing crosses. In another method, marker genes integrated into a transposon are used for the transformation together with desired nucleic acid (known as the Ac/Ds technology). The transformants can be crossed with a transposase source or the transformants are transformed with a nucleic acid construct conferring expression of a transposase, transiently or stable. In some cases (approx. 10%), the transposon jumps out of the genome of the host cell once transformation has taken place successfully and is lost. In a further number of cases, the transposon jumps to a different location. In these cases the marker gene must be eliminated by performing crosses. In microbiology, techniques were developed which make possible, or facilitate, the detection of such events. A further advantageous method relies on what is known as recombination systems; whose advantage is that elimination by crossing can be dispensed with. The best-known system of this type is what is known as the Cre/lox system. Cre1 is a recombinase that removes the sequences located between the loxP sequences. If the marker gene is integrated between the loxP sequences, it is removed once transformation has taken place successfully, by expression of the recombinase. Further recombination systems are the HIN/HIX, FLP/FRT and REP/STB system (Tribble et al., J. Biol. Chem., 275, 2000: 22255-22267; Velmurugan et al., J. Cell Biol., 149, 2000: 553-566). A site-specific integration into the plant genome of the nucleic acid sequences according to the invention is possible. Naturally, these methods can also be applied to microorganisms such as yeast, fungi or bacteria.

### Transgenic/Transgene/Recombinant

[0072] For the purposes of the invention, “transgenic”, “transgene” or “recombinant” means with regard to, for example, a nucleic acid sequence, an expression cassette, gene construct or a vector comprising the nucleic acid sequence or an organism transformed with the nucleic acid sequences, expression cassettes or vectors according to the invention, all those constructions brought about by recombinant methods in which either
[0073] (a) the nucleic acid sequences encoding proteins useful in the methods of the invention, or
[0074] (b) genetic control sequence(s) which is operably linked with the nucleic acid sequence according to the invention, for example a promoter, or
[0075] (c) a) and b)
   are not located in their natural genetic environment or have been modified by recombinant methods, it being possible for the modification to take the form of, for example, a substitution, addition, deletion, inversion or insertion of one or more nucleotide residues. The natural genetic environment is understood as meaning the natural genomic or chromosomal locus in the original plant or the presence in a genomic library. In the case of a genomic library, the natural genetic environment of the nucleic acid sequence is preferably retained, at least in part. The environment flanks the nucleic acid sequence at least on one side and has a sequence length of at least 50 bp, preferably at least 500 bp, especially preferably at least 1000 bp, most preferably at least 5000 bp. A naturally occurring expression cassette—for example the naturally occurring combination of the natural promoter of the nucleic acid sequences with the corresponding nucleic acid sequence encoding a polypeptide useful in the methods of the present invention, as defined above—becomes a transgenic expression cassette when this expression cassette is modified by non-natural, synthetic (“artificial”) methods such as, for example, mutagenic treatment. Suitable methods are described, for example, in U.S. Pat. No. 5,565,350 or WO 00/15815.

[0076] A transgenic plant for the purposes of the invention is thus understood as meaning, as above, that the nucleic acids used in the method of the invention are not present in, or originating from, the genome of said plant, or are present in the genome of said plant but not at their natural locus in the genome of said plant, it being possible for the nucleic acids to be expressed homologously or heterologously. However, as mentioned, transgenic also means that, while the nucleic acids according to the invention or used in the inventive method are at their natural position in the genome of a plant, the sequence has been modified with regard to the natural sequence, and/or that the regulatory sequences of the natural sequences have been modified. Transgenic is preferably understood as meaning the expression of the nucleic acids according to the invention at an unnatural locus in the genome, i.e. homologous or, preferably, heterologous expression of the nucleic acids takes place. Preferred transgenic plants are mentioned herein.

[0077] It shall further be noted that in the context of the present invention, the term “isolated nucleic acid” or “isolated polypeptide” may in some instances be considered as a synonym for a “recombinant nucleic acid” or a “recombinant polypeptide”, respectively and refers to a nucleic acid or polypeptide that is not located in its natural genetic environment and/or that has been modified by recombinant methods.

### Modulation

[0078] The term “modulation” means in relation to expression or gene expression, a process in which the expression level is changed by said gene expression in comparison to the control plant, the expression level may be increased or decreased. The original, unmodulated expression may be of any kind of expression of a structural RNA (rRNA, tRNA) or mRNA with subsequent translation. For the purposes of this invention, the original unmodulated expression may also be absence of any expression. The term “modulating the activity” shall mean any change of the expression of the inventive nucleic acid sequences or encoded proteins, which leads to increased yield and/or increased growth of the plants. The expression can increase from zero (absence of, or immeasurable expression) to a certain amount, or can decrease from a certain amount to immeasurable small amounts or zero.

### Expression

[0079] The term “expression” or “gene expression” means the transcription of a specific gene or specific genes or specific genetic construct. The term “expression” or “gene expression” in particular means the transcription of a gene or genes or genetic construct into structural RNA (rRNA, tRNA) or mRNA with or without subsequent translation of the latter into a protein. The process includes transcription of DNA and processing of the resulting mRNA product.

### Increased Expression/Overexpression

[0080] The term “increased expression” or “overexpression” as used herein means any form of expression that is additional to the original wild-type expression level. For the purposes of this invention, the original wild-type expression level might also be zero, i.e. absence of expression or immeasurable expression.

[0081] Methods for increasing expression of genes or gene products are well documented in the art and include, for example, overexpression driven by appropriate promoters, the use of transcription enhancers or translation enhancers. Isolated nucleic acids which serve as promoter or enhancer elements may be introduced in an appropriate position (typically upstream) of a non-heterologous form of a polynucleotide so as to upregulate expression of a nucleic acid encoding the polypeptide of interest. For example, endogenous promoters may be altered in vivo by mutation, deletion, and/or substitution (see, Kmiec, U.S. Pat. No. 5,565,350; Zarling et al., WO9322443), or isolated promoters may be introduced into a plant cell in the proper orientation and distance from a gene of the present invention so as to control the expression of the gene.

[0082] If polypeptide expression is desired, it is generally desirable to include a polyadenylation region at the 3′-end of a polynucleotide coding region. The polyadenylation region can be derived from the natural gene, from a variety of other plant genes, or from T-DNA. The 3′ end sequence to be added may be derived from, for example, the nopaline synthase or octopine synthase genes, or alternatively from another plant gene, or less preferably from any other eukaryotic gene.

[0083] An intron sequence may also be added to the 5′ untranslated region (UTR) or the coding sequence of the partial coding sequence to increase the amount of the mature message that accumulates in the cytosol. Inclusion of a spliceable intron in the transcription unit in both plant and animal expression constructs has been shown to increase gene expression at both the mRNA and protein levels up to 1000-fold (Buchman and Berg (1988) Mol. Cell biol. 8: 4395-4405; Callis et al. (1987) Genes Dev 1:1183-1200). Such intron enhancement of gene expression is typically greatest when placed near the 5′ end of the transcription unit. Use of the maize introns Adh1-S intron 1, 2, and 6, the Bronze-1 intron are known in the art. For general information see: The Maize Handbook, Chapter 116, Freeling and Walbot, Eds., Springer, N.Y. (1994).

### Decreased Expression

[0084] Reference herein to “decreased expression” or “reduction or substantial elimination” of expression is taken to mean a decrease in endogenous gene expression and/or polypeptide levels and/or polypeptide activity relative to control plants. The reduction or substantial elimination is in increasing order of preference at least 10%, 20%, 30%, 40% or 50%, 60%, 70%, 80%, 85%, 90%, or 95%, 96%, 97%, 98%, 99% or more reduced compared to that of control plants.

[0085] For the reduction or substantial elimination of expression an endogenous gene in a plant, a sufficient length of substantially contiguous nucleotides of a nucleic acid sequence is required. In order to perform gene silencing, this may be as little as 20, 19, 18, 17, 16, 15, 14, 13, 12, 11, 10 or fewer nucleotides, alternatively this may be as much as the entire gene (including the 5′ and/or 3′ UTR, either in part or in whole). The stretch of substantially contiguous nucleotides may be derived from the nucleic acid encoding the protein of interest (target gene), or from any nucleic acid capable of encoding an orthologue, paralogue or homologue of the protein of interest. Preferably, the stretch of substantially contiguous nucleotides is capable of forming hydrogen bonds with the target gene (either sense or antisense strand), more preferably, the stretch of substantially contiguous nucleotides has, in increasing order of preference, 50%, 60%, 70%, 80%, 85%, 90%, 95%, 96%, 97%, 98%, 99%, 100% sequence identity to the target gene (either sense or antisense strand). A nucleic acid sequence encoding a (functional) polypeptide is not a requirement for the various methods discussed herein for the reduction or substantial elimination of expression of an endogenous gene.

[0086] This reduction or substantial elimination of expression may be achieved using routine tools and techniques. A preferred method for the reduction or substantial elimination of endogenous gene expression is by introducing and expressing in a plant a genetic construct into which the nucleic acid (in this case a stretch of substantially contiguous nucleotides derived from the gene of interest, or from any nucleic acid capable of encoding an orthologue, paralogue or homologue of any one of the protein of interest) is cloned as an inverted repeat (in part or completely), separated by a spacer (non-coding DNA).

[0087] In such a preferred method, expression of the endogenous gene is reduced or substantially eliminated through RNA-mediated silencing using an inverted repeat of a nucleic acid or a part thereof (in this case a stretch of substantially contiguous nucleotides derived from the gene of interest, or from any nucleic acid capable of encoding an orthologue, paralogue or homologue of the protein of interest), preferably capable of forming a hairpin structure. The inverted repeat is cloned in an expression vector comprising control sequences. A non-coding DNA nucleic acid sequence (a spacer, for example a matrix attachment region fragment (MAR), an intron, a polylinker, etc.) is located between the two inverted nucleic acids forming the inverted repeat. After transcription of the inverted repeat, a chimeric RNA with a self-complementary structure is formed (partial or complete). This double-stranded RNA structure is referred to as the hairpin RNA (hpRNA). The hpRNA is processed by the plant into siRNAs that are incorporated into an RNA-induced silencing complex (RISC). The RISC further cleaves the mRNA transcripts, thereby substantially reducing the number of mRNA transcripts to be translated into polypeptides. For further general details see for example, Grierson et al. (1998) WO 98/53083; Waterhouse et al. (1999) WO 99/53050).

[0088] Performance of the methods of the invention does not rely on introducing and expressing in a plant a genetic construct into which the nucleic acid is cloned as an inverted repeat, but any one or more of several well-known “gene silencing” methods may be used to achieve the same effects.

[0089] One such method for the reduction of endogenous gene expression is RNA-mediated silencing of gene expression (downregulation). Silencing in this case is triggered in a plant by a double stranded RNA sequence (dsRNA) that is substantially similar to the target endogenous gene. This dsRNA is further processed by the plant into about 20 to about 26 nucleotides called short interfering RNAs (siRNAs). The siRNAs are incorporated into an RNA-induced silencing complex (RISC) that cleaves the mRNA transcript of the endogenous target gene, thereby substantially reducing the number of mRNA transcripts to be translated into a polypeptide. Preferably, the double stranded RNA sequence corresponds to a target gene.

[0090] Another example of an RNA silencing method involves the introduction of nucleic acid sequences or parts thereof (in this case a stretch of substantially contiguous nucleotides derived from the gene of interest, or from any nucleic acid capable of encoding an orthologue, paralogue or homologue of the protein of interest) in a sense orientation into a plant. “Sense orientation” refers to a DNA sequence that is homologous to an mRNA transcript thereof. Introduced into a plant would therefore be at least one copy of the nucleic acid sequence. The additional nucleic acid sequence will reduce expression of the endogenous gene, giving rise to a phenomenon known as co-suppression. The reduction of gene expression will be more pronounced if several additional copies of a nucleic acid sequence are introduced into the plant, as there is a positive correlation between high transcript levels and the triggering of co-suppression.

[0091] Another example of an RNA silencing method involves the use of antisense nucleic acid sequences. An “antisense” nucleic acid sequence comprises a nucleotide sequence that is complementary to a “sense” nucleic acid sequence encoding a protein, i.e. complementary to the coding strand of a double-stranded cDNA molecule or complementary to an mRNA transcript sequence. The antisense nucleic acid sequence is preferably complementary to the endogenous gene to be silenced. The complementarity may be located in the “coding region” and/or in the “non-coding region” of a gene. The term “coding region” refers to a region of the nucleotide sequence comprising codons that are translated into amino acid residues. The term “non-coding region” refers to 5′ and 3′ sequences that flank the coding region that are transcribed but not translated into amino acids (also referred to as 5′ and 3′ untranslated regions).

[0092] Antisense nucleic acid sequences can be designed according to the rules of Watson and Crick base pairing. The antisense nucleic acid sequence may be complementary to the entire nucleic acid sequence (in this case a stretch of substantially contiguous nucleotides derived from the gene of interest, or from any nucleic acid capable of encoding an orthologue, paralogue or homologue of the protein of interest), but may also be an oligonucleotide that is antisense to only a part of the nucleic acid sequence (including the mRNA 5′ and 3′ UTR). For example, the antisense oligonucleotide sequence may be complementary to the region surrounding the translation start site of an mRNA transcript encoding a polypeptide. The length of a suitable antisense oligonucleotide sequence is known in the art and may start from about 50, 45, 40, 35, 30, 25, 20, 15 or 10 nucleotides in length or less. An antisense nucleic acid sequence according to the invention may be constructed using chemical synthesis and enzymatic ligation reactions using methods known in the art. For example, an antisense nucleic acid sequence (e.g., an antisense oligonucleotide sequence) may be chemically synthesized using naturally occurring nucleotides or variously modified nucleotides designed to increase the biological stability of the molecules or to increase the physical stability of the duplex formed between the antisense and sense nucleic acid sequences, e.g., phosphorothioate derivatives and acridine substituted nucleotides may be used. Examples of modified nucleotides that may be used to generate the antisense nucleic acid sequences are well known in the art. Known nucleotide modifications include methylation, cyclization and ‘caps’ and substitution of one or more of the naturally occurring nucleotides with an analogue such as inosine. Other modifications of nucleotides are well known in the art.

[0093] The antisense nucleic acid sequence can be produced biologically using an expression vector into which a nucleic acid sequence has been subcloned in an antisense orientation (i.e., RNA transcribed from the inserted nucleic acid will be of an antisense orientation to a target nucleic acid of interest). Preferably, production of antisense nucleic acid sequences in plants occurs by means of a stably integrated nucleic acid construct comprising a promoter, an operably linked antisense oligonucleotide, and a terminator.

[0094] The nucleic acid molecules used for silencing in the methods of the invention (whether introduced into a plant or generated in situ) hybridize with or bind to mRNA transcripts and/or genomic DNA encoding a polypeptide to thereby inhibit expression of the protein, e.g., by inhibiting transcription and/or translation. The hybridization can be by conventional nucleotide complementarity to form a stable duplex, or, for example, in the case of an antisense nucleic acid sequence which binds to DNA duplexes, through specific interactions in the major groove of the double helix. Antisense nucleic acid sequences may be introduced into a plant by transformation or direct injection at a specific tissue site. Alternatively, antisense nucleic acid sequences can be modified to target selected cells and then administered systemically. For example, for systemic administration, antisense nucleic acid sequences can be modified such that they specifically bind to receptors or antigens expressed on a selected cell surface, e.g., by linking the antisense nucleic acid sequence to peptides or antibodies which bind to cell surface receptors or antigens. The antisense nucleic acid sequences can also be delivered to cells using the vectors described herein.

[0095] According to a further aspect, the antisense nucleic acid sequence is an a-anomeric nucleic acid sequence. An a-anomeric nucleic acid sequence forms specific double-stranded hybrids with complementary RNA in which, contrary to the usual b-units, the strands run parallel to each other (Gaultier et al. (1987) Nucl Ac Res 15: 6625-6641). The antisense nucleic acid sequence may also comprise a 2′-o-methylribonucleotide (Inoue et al. (1987) Nucl Ac Res 15, 6131-6148) or a chimeric RNA-DNA analogue (Inoue et al. (1987) FEBS Lett. 215, 327-330).

[0096] The reduction or substantial elimination of endogenous gene expression may also be performed using ribozymes. Ribozymes are catalytic RNA molecules with ribonuclease activity that are capable of cleaving a single-stranded nucleic acid sequence, such as an mRNA, to which they have a complementary region. Thus, ribozymes (e.g., hammerhead ribozymes (described in Haselhoff and Gerlach (1988) Nature 334, 585-591) can be used to catalytically cleave mRNA transcripts encoding a polypeptide, thereby substantially reducing the number of mRNA transcripts to be translated into a polypeptide. A ribozyme having specificity for a nucleic acid sequence can be designed (see for example: Cech et al. U.S. Pat. No. 4,987,071; and Cech et al. U.S. Pat. No. 5,116,742). Alternatively, mRNA transcripts corresponding to a nucleic acid sequence can be used to select a catalytic RNA having a specific ribonuclease activity from a pool of RNA molecules (Bartel and Szostak (1993) Science 261, 1411-1418). The use of ribozymes for gene silencing in plants is known in the art (e.g., Atkins et al. (1994) WO 94/00012; Lenne et al. (1995) WO 95/03404; Lutziger et al. (2000) WO 00/00619; Prinsen et al. (1997) WO 97/13865 and Scott et al. (1997) WO 97/38116).

[0097] Gene silencing may also be achieved by insertion mutagenesis (for example, T-DNA insertion or transposon insertion) or by strategies as described by, among others, Angell and Baulcombe ((1999) Plant J 20(3): 357-62), (Amplicon VIGS WO 98/36083), or Baulcombe (WO 99/15682).

[0098] Gene silencing may also occur if there is a mutation on an endogenous gene and/or a mutation on an isolated gene/nucleic acid subsequently introduced into a plant. The reduction or substantial elimination may be caused by a non-functional polypeptide. For example, the polypeptide may bind to various interacting proteins; one or more mutation(s) and/or truncation(s) may therefore provide for a polypeptide that is still able to bind interacting proteins (such as receptor proteins) but that cannot exhibit its normal function (such as signalling ligand).

[0099] A further approach to gene silencing is by targeting nucleic acid sequences complementary to the regulatory region of the gene (e.g., the promoter and/or enhancers) to form triple helical structures that prevent transcription of the gene in target cells. See Helene, C., Anticancer Drug Res. 6, 569-84, 1991; Helene et al., Ann. N.Y. Acad. Sci. 660, 27-36 1992; and Maher, L. J. Bioassays 14, 807-15, 1992.

[0100] Other methods, such as the use of antibodies directed to an endogenous polypeptide for inhibiting its function in planta, or interference in the signalling pathway in which a polypeptide is involved, will be well known to the skilled man. In particular, it can be envisaged that manmade molecules may be useful for inhibiting the biological function of a target polypeptide, or for interfering with the signalling pathway in which the target polypeptide is involved.

[0101] Alternatively, a screening program may be set up to identify in a plant population natural variants of a gene, which variants encode polypeptides with reduced activity. Such natural variants may also be used for example, to perform homologous recombination.

[0102] Artificial and/or natural microRNAs (miRNAs) may be used to knock out gene expression and/or mRNA translation. Endogenous miRNAs are single stranded small RNAs of typically 19-24 nucleotides long. They function primarily to regulate gene expression and/or mRNA translation. Most plant microRNAs (miRNAs) have perfect or near-perfect complementarity with their target sequences. However, there are natural targets with up to five mismatches. They are processed from longer non-coding RNAs with characteristic fold-back structures by double-strand specific RNases of the Dicer family. Upon processing, they are incorporated in the RNA-induced silencing complex (RISC) by binding to its main component, an Argonaute protein. mRNAs serve as the specificity components of RISC, since they base-pair to target nucleic acids, mostly mRNAs, in the cytoplasm. Subsequent regulatory events include target mRNA cleavage and destruction and/or translational inhibition. Effects of miRNA overexpression are thus often reflected in decreased mRNA levels of target genes.

[0103] Artificial microRNAs (amiRNAs), which are typically 21 nucleotides in length, can be genetically engineered specifically to negatively regulate gene expression of single or multiple genes of interest. Determinants of plant microRNA target selection are well known in the art. Empirical parameters for target recognition have been defined and can be used to aid in the design of specific amiRNAs, (Schwab et al., Dev. Cell 8, 517-527, 2005). Convenient tools for design and generation of amiRNAs and their precursors are also available to the public (Schwab et al., Plant Cell 18, 1121-1133, 2006).

[0104] For optimal performance, the gene silencing techniques used for reducing expression in a plant of an endogenous gene requires the use of nucleic acid sequences from monocotyledonous plants for transformation of monocotyledonous plants, and from dicotyledonous plants for transformation of dicotyledonous plants. Preferably, a nucleic acid sequence from any given plant species is introduced into that same species. For example, a nucleic acid sequence from rice is transformed into a rice plant. However, it is not an absolute requirement that the nucleic acid sequence to be introduced originates from the same plant species as the plant in which it will be introduced. It is sufficient that there is substantial homology between the endogenous target gene and the nucleic acid to be introduced.

[0105] Described above are examples of various methods for the reduction or substantial elimination of expression in a plant of an endogenous gene. A person skilled in the art would readily be able to adapt the aforementioned methods for silencing so as to achieve reduction of expression of an endogenous gene in a whole plant or in parts thereof through the use of an appropriate promoter, for example.

### Transformation

[0106] The term “introduction” or “transformation” as referred to herein encompasses the transfer of an exogenous polynucleotide into a host cell, irrespective of the method used for transfer. Plant tissue capable of subsequent clonal propagation, whether by organogenesis or embryogenesis, may be transformed with a genetic construct of the present invention and a whole plant regenerated there from. The particular tissue chosen will vary depending on the clonal propagation systems available for, and best suited to, the particular species being transformed. Exemplary tissue targets include leaf disks, pollen, embryos, cotyledons, hypocotyls, megagametophytes, callus tissue, existing meristematic tissue (e.g., apical meristem, axillary buds, and root meristems), and induced meristem tissue (e.g., cotyledon meristem and hypocotyl meristem). The polynucleotide may be transiently or stably introduced into a host cell and may be maintained non-integrated, for example, as a plasmid. Alternatively, it may be integrated into the host genome. The resulting transformed plant cell may then be used to regenerate a transformed plant in a manner known to persons skilled in the art.

[0107] The transfer of foreign genes into the genome of a plant is called transformation. Transformation of plant species is now a fairly routine technique. Advantageously, any of several transformation methods may be used to introduce the gene of interest into a suitable ancestor cell. The methods described for the transformation and regeneration of plants from plant tissues or plant cells may be utilized for transient or for stable transformation. Transformation methods include the use of liposomes, electroporation, chemicals that increase free DNA uptake, injection of the DNA directly into the plant, particle gun bombardment, transformation using viruses or pollen and microprojection. Methods may be selected from the calcium/polyethylene glycol method for protoplasts (Krens, F. A. et al., (1982) Nature 296, 72-74; Negrutiu I et al. (1987) Plant Mol Biol 8: 363-373); electroporation of protoplasts (Shillito R. D. et al. (1985) Bio/Technol 3, 1099-1102); microinjection into plant material (Crossway A et al., (1986) Mol. Gen Genet 202: 179-185); DNA or RNA-coated particle bombardment (Klein T M et al., (1987) Nature 327: 70) infection with (non-integrative) viruses and the like. Transgenic plants, including transgenic crop plants, are preferably produced via Agrobacterium-mediated transformation. An advantageous transformation method is the transformation in planta. To this end, it is possible, for example, to allow the agrobacteria to act on plant seeds or to inoculate the plant meristem with agrobacteria. It has proved particularly expedient in accordance with the invention to allow a suspension of transformed agrobacteria to act on the intact plant or at least on the flower primordia. The plant is subsequently grown on until the seeds of the treated plant are obtained (Clough and Bent, Plant J. (1998) 16, 735-743). Methods for Agrobacterium-mediated transformation of rice include well known methods for rice transformation, such as those described in any of the following: European patent application EP 1198985 A1, Aldemita and Hodges (Planta 199: 612-617, 1996); Chan et al. (Plant Mol Biol 22 (3): 491-506, 1993), Hiei et al. (Plant J 6 (2): 271-282, 1994), which disclosures are incorporated by reference herein as if fully set forth. In the case of corn transformation, the preferred method is as described in either Ishida et al. (Nat. Biotechnol 14(6): 745-50, 1996) or Frame et al. (Plant Physiol 129(1): 13-22, 2002), which disclosures are incorporated by reference herein as if fully set forth. Said methods are further described by way of example in B. Jenes et al., Techniques for Gene Transfer, in: Transgenic Plants, Vol. 1, Engineering and Utilization, eds. S. D. Kung and R. Wu, Academic Press (1993) 128-143 and in Potrykus Annu. Rev. Plant Physiol. Plant Molec. Biol. 42 (1991) 205-225). The nucleic acids or the construct to be expressed is preferably cloned into a vector, which is suitable for transforming Agrobacterium tumefaciens, for example pBin19 (Bevan et al., Nucl. Acids Res. 12 (1984) 8711). Agrobacteria transformed by such a vector can then be used in known manner for the transformation of plants, such as plants used as a model, like Arabidopsis (Arabidopsis thaliana is within the scope of the present invention not considered as a crop plant), or crop plants such as, by way of example, tobacco plants, for example by immersing bruised leaves or chopped leaves in an agrobacterial solution and then culturing them in suitable media. The transformation of plants by means of Agrobacterium tumefaciens is described, for example, by Hofgen and Willmitzer in Nucl. Acid Res. (1988) 16, 9877 or is known inter alia from F. F. White, Vectors for Gene Transfer in Higher Plants; in Transgenic Plants, Vol. 1, Engineering and Utilization, eds. S. D. Kung and R. Wu, Academic Press, 1993, pp. 15-38.

[0108] In addition to the transformation of somatic cells, which then have to be regenerated into intact plants, it is also possible to transform the cells of plant meristems and in particular those cells which develop into gametes. In this case, the transformed gametes follow the natural plant development, giving rise to transgenic plants. Thus, for example, seeds of Arabidopsis are treated with agrobacteria and seeds are obtained from the developing plants of which a certain proportion is transformed and thus transgenic [Feldman, K A and Marks M D (1987). Mol Gen Genet 208:1-9; Feldmann K (1992). In: C Koncz, N-H Chua and J Shell, eds, Methods in Arabidopsis Research. Word Scientific, Singapore, pp. 274-289]. Alternative methods are based on the repeated removal of the inflorescences and incubation of the excision site in the center of the rosette with transformed agrobacteria, whereby transformed seeds can likewise be obtained at a later point in time (Chang (1994). Plant J. 5: 551-558; Katavic (1994). Mol Gen Genet, 245: 363-370). However, an especially effective method is the vacuum infiltration method with its modifications such as the “floral dip” method. In the case of vacuum infiltration of Arabidopsis, intact plants under reduced pressure are treated with an agrobacterial suspension [Bechthold, N (1993). C R Acad Sci Paris Life Sci, 316: 1194-1199], while in the case of the “floral dip” method the developing floral tissue is incubated briefly with a surfactant-treated agrobacterial suspension [Clough, S J and Bent A F (1998) The Plant J. 16, 735-743]. A certain proportion of transgenic seeds are harvested in both cases, and these seeds can be distinguished from non-transgenic seeds by growing under the above-described selective conditions. In addition the stable transformation of plastids is of advantages because plastids are inherited maternally is most crops reducing or eliminating the risk of transgene flow through pollen. The transformation of the chloroplast genome is generally achieved by a process which has been schematically displayed in Klaus et al., 2004 [Nature Biotechnology 22 (2), 225-229]. Briefly the sequences to be transformed are cloned together with a selectable marker gene between flanking sequences homologous to the chloroplast genome. These homologous flanking sequences direct site specific integration into the plastome. Plastidal transformation has been described for many different plant species and an overview is given in Bock (2001) Transgenic plastids in basic research and plant biotechnology. J Mol Biol. 2001 Sep. 21; 312 (3):425-38 or Maliga, P (2003) Progress towards commercialization of plastid transformation technology. Trends Biotechnol. 21, 20-28. Further biotechnological progress has recently been reported in form of marker free plastid transformants, which can be produced by a transient co-integrated maker gene (Klaus et al., 2004, Nature Biotechnology 22(2), 225-229).

[0109] The genetically modified plant cells can be regenerated via all methods with which the skilled worker is familiar. Suitable methods can be found in the above-mentioned publications by S. D. Kung and R. Wu, Potrykus or Höfgen and Willmitzer.

[0110] Generally after transformation, plant cells or cell groupings are selected for the presence of one or more markers which are encoded by plant-expressible genes co-transferred with the gene of interest, following which the transformed material is regenerated into a whole plant. To select transformed plants, the plant material obtained in the transformation is, as a rule, subjected to selective conditions so that transformed plants can be distinguished from untransformed plants. For example, the seeds obtained in the above-described manner can be planted and, after an initial growing period, subjected to a suitable selection by spraying. A further possibility consists in growing the seeds, if appropriate after sterilization, on agar plates using a suitable selection agent so that only the transformed seeds can grow into plants. Alternatively, the transformed plants are screened for the presence of a selectable marker such as the ones described above.

[0111] Following DNA transfer and regeneration, putatively transformed plants may also be evaluated, for instance using Southern analysis, for the presence of the gene of interest, copy number and/or genomic organisation. Alternatively or additionally, expression levels of the newly introduced DNA may be monitored using Northern and/or Western analysis, both techniques being well known to persons having ordinary skill in the art.

[0112] The generated transformed plants may be propagated by a variety of means, such as by clonal propagation or classical breeding techniques. For example, a first generation (or T1) transformed plant may be selfed and homozygous second-generation (or T2) transformants selected, and the T2 plants may then further be propagated through classical breeding techniques. The generated transformed organisms may take a variety of forms. For example, they may be chimeras of transformed cells and non-transformed cells; clonal transformants (e.g., all cells transformed to contain the expression cassette); grafts of transformed and untransformed tissues (e.g., in plants, a transformed rootstock grafted to an untransformed scion).

### T-DNA Activation Tagging

[0113] T-DNA activation tagging (Hayashi et al. Science (1992) 1350-1353), involves insertion of T-DNA, usually containing a promoter (may also be a translation enhancer or an intron), in the genomic region of the gene of interest or 10 kb up- or downstream of the coding region of a gene in a configuration such that the promoter directs expression of the targeted gene. Typically, regulation of expression of the targeted gene by its natural promoter is disrupted and the gene falls under the control of the newly introduced promoter. The promoter is typically embedded in a T-DNA. This T-DNA is randomly inserted into the plant genome, for example, through Agrobacterium infection and leads to modified expression of genes near the inserted T-DNA. The resulting transgenic plants show dominant phenotypes due to modified expression of genes close to the introduced promoter.

### TILLING

[0114] The term “TILLING” is an abbreviation of “Targeted Induced Local Lesions In Genomes” and refers to a mutagenesis technology useful to generate and/or identify nucleic acids encoding proteins with modified expression and/or activity. TILLING also allows selection of plants carrying such mutant variants. These mutant variants may exhibit modified expression, either in strength or in location or in timing (if the mutations affect the promoter for example). These mutant variants may exhibit higher activity than that exhibited by the gene in its natural form. TILLING combines high-density mutagenesis with high-throughput screening methods. The steps typically followed in TILLING are: (a) EMS mutagenesis (Redei G P and Koncz C (1992) In Methods in Arabidopsis Research, Koncz C, Chua N H, Schell J, eds. Singapore, World Scientific Publishing Co, pp. 16-82; Feldmann et al., (1994) In Meyerowitz E M, Somerville C R, eds, Arabidopsis. Cold Spring Harbor Laboratory Press, Cold Spring Harbor, N.Y., pp 137-172; Lightner J and Caspar T (1998) In J Martinez-Zapater, J Salinas, eds, Methods on Molecular Biology, Vol. 82. Humana Press, Totowa, N.J., pp 91-104); (b) DNA preparation and pooling of individuals; (c) PCR amplification of a region of interest; (d) denaturation and annealing to allow formation of heteroduplexes; (e) DHPLC, where the presence of a heteroduplex in a pool is detected as an extra peak in the chromatogram; (f) identification of the mutant individual; and (g) sequencing of the mutant PCR product. Methods for TILLING are well known in the art (McCallum et al., (2000) Nat Biotechnol 18: 455-457; reviewed by Stemple (2004) Nat Rev Genet. 5(2): 145-50).

### Homologous Recombination

[0115] Homologous recombination allows introduction in a genome of a selected nucleic acid at a defined selected position. Homologous recombination is a standard technology used routinely in biological sciences for lower organisms such as yeast or the moss Physcomitrella. Methods for performing homologous recombination in plants have been described not only for model plants (Offring a et al. (1990) EMBO J 9(10): 3077-84) but also for crop plants, for example rice (Terada et al. (2002) Nat Biotech 20(10): 1030-4; Iida and Terada (2004) Curr Opin Biotech 15(2): 132-8), and approaches exist that are generally applicable regardless of the target organism (Miller et al, Nature Biotechnol. 25, 778-785, 2007).

### Yield Related Traits

[0116] Yield related traits are traits or features which are related to plant yield. Yield-related traits may comprise one or more of the following non-limitative list of features: early flowering time, yield, biomass, seed yield, early vigour, greenness index, increased growth rate, improved agronomic traits, such as e.g. increased tolerance to submergence (which leads to increased yield in rice), improved Water Use Efficiency (WUE), improved Nitrogen Use Efficiency (NUE), etc.

### Yield

[0117] The term “yield” in general means a measurable produce of economic value, typically related to a specified crop, to an area, and to a period of time. Individual plant parts directly contribute to yield based on their number, size and/or weight, or the actual yield is the yield per square meter for a crop and year, which is determined by dividing total production (includes both harvested and appraised production) by planted square meters.

[0118] The terms “yield” of a plant and “plant yield” are used interchangeably herein and are meant to refer to vegetative biomass such as root and/or shoot biomass, to reproductive organs, and/or to propagules such as seeds of that plant.

[0119] Flowers in maize are unisexual; male inflorescences (tassels) originate from the apical stem and female inflorescences (ears) arise from axillary bud apices. The female inflorescence produces pairs of spikelets on the surface of a central axis (cob). Each of the female spikelets encloses two fertile florets, one of them will usually mature into a maize kernel once fertilized. Hence a yield increase in maize may be manifested as one or more of the following: increase in the number of plants established per square meter, an increase in the number of ears per plant, an increase in the number of rows, number of kernels per row, kernel weight, thousand kernel weight, ear length/diameter, increase in the seed filling rate, which is the number of filled florets (i.e. florets containing seed) divided by the total number of florets and multiplied by 100), among others.

[0120] Inflorescences in rice plants are named panicles. The panicle bears spikelets, which are the basic units of the panicles, and which consist of a pedicel and a floret. The floret is borne on the pedicel and includes a flower that is covered by two protective glumes: a larger glume (the lemma) and a shorter glume (the palea). Hence, taking rice as an example, a yield increase may manifest itself as an increase in one or more of the following: number of plants per square meter, number of panicles per plant, panicle length, number of spikelets per panicle, number of flowers (or florets) per panicle; an increase in the seed filling rate which is the number of filled florets (i.e. florets containing seeds) divided by the total number of florets and multiplied by 100; an increase in thousand kernel weight, among others.

### Early Flowering Time

[0121] Plants having an “early flowering time” as used herein are plants which start to flower earlier than control plants. Hence this term refers to plants that show an earlier start of flowering. Flowering time of plants can be assessed by counting the number of days (“time to flower”) between sowing and the emergence of a first inflorescence. The “flowering time” of a plant can for instance be determined using the method as described in WO 2007/093444.

### Early Vigour

[0122] “Early vigour” refers to active healthy well-balanced growth especially during early stages of plant growth, and may result from increased plant fitness due to, for example, the plants being better adapted to their environment (i.e. optimizing the use of energy resources and partitioning between shoot and root). Plants having early vigour also show increased seedling survival and a better establishment of the crop, which often results in highly uniform fields (with the crop growing in uniform manner, i.e. with the majority of plants reaching the various stages of development at substantially the same time), and often better and higher yield. Therefore, early vigour may be determined by measuring various factors, such as thousand kernel weight, percentage germination, percentage emergence, seedling growth, seedling height, root length, root and shoot biomass and many more.

### Increased Growth Rate

[0123] The increased growth rate may be specific to one or more parts of a plant (including seeds), or may be throughout substantially the whole plant. Plants having an increased growth rate may have a shorter life cycle. The life cycle of a plant may be taken to mean the time needed to grow from a dry mature seed up to the stage where the plant has produced dry mature seeds, similar to the starting material. This life cycle may be influenced by factors such as speed of germination, early vigour, growth rate, greenness index, flowering time and speed of seed maturation. The increase in growth rate may take place at one or more stages in the life cycle of a plant or during substantially the whole plant life cycle. Increased growth rate during the early stages in the life cycle of a plant may reflect enhanced vigour. The increase in growth rate may alter the harvest cycle of a plant allowing plants to be sown later and/or harvested sooner than would otherwise be possible (a similar effect may be obtained with earlier flowering time). If the growth rate is sufficiently increased, it may allow for the further sowing of seeds of the same plant species (for example sowing and harvesting of rice plants followed by sowing and harvesting of further rice plants all within one conventional growing period). Similarly, if the growth rate is sufficiently increased, it may allow for the further sowing of seeds of different plants species (for example the sowing and harvesting of corn plants followed by, for example, the sowing and optional harvesting of soybean, potato or any other suitable plant). Harvesting additional times from the same rootstock in the case of some crop plants may also be possible. Altering the harvest cycle of a plant may lead to an increase in annual biomass production per square meter (due to an increase in the number of times (say in a year) that any particular plant may be grown and harvested). An increase in growth rate may also allow for the cultivation of transgenic plants in a wider geographical area than their wild-type counterparts, since the territorial limitations for growing a crop are often determined by adverse environmental conditions either at the time of planting (early season) or at the time of harvesting (late season). Such adverse conditions may be avoided if the harvest cycle is shortened. The growth rate may be determined by deriving various parameters from growth curves, such parameters may be: T-Mid (the time taken for plants to reach 50% of their maximal size) and T-90 (time taken for plants to reach 90% of their maximal size), amongst others.

### Stress Resistance

[0124] An increase in yield and/or growth rate occurs whether the plant is under non-stress conditions or whether the plant is exposed to various stresses compared to control plants. Plants typically respond to exposure to stress by growing more slowly. In conditions of severe stress, the plant may even stop growing altogether. Mild stress on the other hand is defined herein as being any stress to which a plant is exposed which does not result in the plant ceasing to grow altogether without the capacity to resume growth. Mild stress in the sense of the invention leads to a reduction in the growth of the stressed plants of less than 40%, 35%, 30% or 25%, more preferably less than 20% or 15% in comparison to the control plant under non-stress conditions. Due to advances in agricultural practices (irrigation, fertilization, pesticide treatments) severe stresses are not often encountered in cultivated crop plants. As a consequence, the compromised growth induced by mild stress is often an undesirable feature for agriculture. “Mild stresses” are the everyday biotic and/or abiotic (environmental) stresses to which a plant is exposed. Abiotic stresses may be due to drought or excess water, anaerobic stress, salt stress, chemical toxicity, oxidative stress and hot, cold or freezing temperatures.

[0125] “Biotic stresses” are typically those stresses caused by pathogens, such as bacteria, viruses, fungi, nematodes and insects.

[0126] The “abiotic stress” may be an osmotic stress caused by a water stress, e.g. due to drought, salt stress, or freezing stress. Abiotic stress may also be an oxidative stress or a cold stress. “Freezing stress” is intended to refer to stress due to freezing temperatures, i.e. temperatures at which available water molecules freeze and turn into ice. “Cold stress”, also called “chilling stress”, is intended to refer to cold temperatures, e.g. temperatures below 10°, or preferably below 5° C., but at which water molecules do not freeze. As reported in Wang et al. (Planta (2003) 218: 1-14), abiotic stress leads to a series of morphological, physiological, biochemical and molecular changes that adversely affect plant growth and productivity. Drought, salinity, extreme temperatures and oxidative stress are known to be interconnected and may induce growth and cellular damage through similar mechanisms. Rabbani et al. (Plant Physiol (2003) 133: 1755-1767) describes a particularly high degree of “cross talk” between drought stress and high-salinity stress. For example, drought and/or salinisation are manifested primarily as osmotic stress, resulting in the disruption of homeostasis and ion distribution in the cell. Oxidative stress, which frequently accompanies high or low temperature, salinity or drought stress, may cause denaturing of functional and structural proteins. As a consequence, these diverse environmental stresses often activate similar cell signalling pathways and cellular responses, such as the production of stress proteins, up-regulation of anti-oxidants, accumulation of compatible solutes and growth arrest. The term “non-stress” conditions as used herein are those environmental conditions that allow optimal growth of plants. Persons skilled in the art are aware of normal soil conditions and climatic conditions for a given location. Plants with optimal growth conditions, (grown under non-stress conditions) typically yield in increasing order of preference at least 97%, 95%, 92%, 90%, 87%, 85%, 83%, 80%, 77% or 75% of the average production of such plant in a given environment. Average production may be calculated on harvest and/or season basis. Persons skilled in the art are aware of average yield productions of a crop.

[0127] In particular, the methods of the present invention may be performed under non-stress conditions. In an example, the methods of the present invention may be performed under non-stress conditions such as mild drought to give plants having increased yield relative to control plants.

[0128] In another embodiment, the methods of the present invention may be performed under stress conditions.

[0129] In an example, the methods of the present invention may be performed under stress conditions such as drought to give plants having increased yield relative to control plants.

[0130] In another example, the methods of the present invention may be performed under stress conditions such as nutrient deficiency to give plants having increased yield relative to control plants.

[0131] Nutrient deficiency may result from a lack of nutrients such as nitrogen, phosphates and other phosphorous-containing compounds, potassium, calcium, magnesium, manganese, iron and boron, amongst others.

[0132] In yet another example, the methods of the present invention may be performed under stress conditions such as salt stress to give plants having increased yield relative to control plants. The term salt stress is not restricted to common salt (NaCl), but may be any one or more of: NaCl, KCl, LiCl, MgCl₂, CaCl₂, amongst others.

[0133] In yet another example, the methods of the present invention may be performed under stress conditions such as cold stress or freezing stress to give plants having increased yield relative to control plants.

### Increase/Improve/Enhance

[0134] The terms “increase”, “improve” or “enhance” are interchangeable and shall mean in the sense of the application at least a 3%, 4%, 5%, 6%, 7%, 8%, 9% or 10%, preferably at least 15% or 20%, more preferably 25%, 30%, 35% or 40% more yield and/or growth in comparison to control plants as defined herein.

### Seed Yield

[0135] Increased seed yield may manifest itself as one or more of the following:
[0136] (a) an increase in seed biomass (total seed weight) which may be on an individual seed basis and/or per plant and/or per square meter;
[0137] (b) increased number of flowers per plant;
[0138] (c) increased number of seeds;
[0139] (d) increased seed filling rate (which is expressed as the ratio between the number of filled florets divided by the total number of florets);
[0140] (e) increased harvest index, which is expressed as a ratio of the yield of harvestable parts, such as seeds, divided by the biomass of aboveground plant parts; and
[0141] (f) increased thousand kernel weight (TKW), which is extrapolated from the number of seeds counted and their total weight. An increased TKW may result from an increased seed size and/or seed weight, and may also result from an increase in embryo and/or endosperm size.

[0142] The terms “filled florets” and “filled seeds” may be considered synonyms.

[0143] An increase in seed yield may also be manifested as an increase in seed size and/or seed volume. Furthermore, an increase in seed yield may also manifest itself as an increase in seed area and/or seed length and/or seed width and/or seed perimeter.

### Greenness Index

[0144] The “greenness index” as used herein is calculated from digital images of plants. For each pixel belonging to the plant object on the image, the ratio of the green value versus the red value (in the RGB model for encoding color) is calculated. The greenness index is expressed as the percentage of pixels for which the green-to-red ratio exceeds a given threshold. Under normal growth conditions, under salt stress growth conditions, and under reduced nutrient availability growth conditions, the greenness index of plants is measured in the last imaging before flowering. In contrast, under drought stress growth conditions, the greenness index of plants is measured in the first imaging after drought.

### Biomass

[0145] The term “biomass” as used herein is intended to refer to the total weight of a plant. Within the definition of biomass, a distinction may be made between the biomass of one or more parts of a plant, which may include any one or more of the following:
[0146] aboveground parts such as but not limited to shoot biomass, seed biomass, leaf biomass, etc.;
[0147] aboveground harvestable parts such as but not limited to shoot biomass, seed biomass, leaf biomass, etc.;
[0148] parts below ground, such as but not limited to root biomass, tubers, bulbs, etc.;
[0149] harvestable parts below ground, such as but not limited to root biomass, tubers, bulbs, etc.;
[0150] harvestable parts partially below ground such as but not limited to beets and other hypocotyl areas of a plant, rhizomes, stolons or creeping rootstalks;
[0151] vegetative biomass such as root biomass, shoot biomass, etc.;
[0152] reproductive organs; and
[0153] propagules such as seed.

### Marker Assisted Breeding

[0154] Such breeding programmes sometimes require introduction of allelic variation by mutagenic treatment of the plants, using for example EMS mutagenesis; alternatively, the programme may start with a collection of allelic variants of so called “natural” origin caused unintentionally. Identification of allelic variants then takes place, for example, by PCR. This is followed by a step for selection of superior allelic variants of the sequence in question and which give increased yield. Selection is typically carried out by monitoring growth performance of plants containing different allelic variants of the sequence in question. Growth performance may be monitored in a greenhouse or in the field. Further optional steps include crossing plants in which the superior allelic variant was identified with another plant. This could be used, for example, to make a combination of interesting phenotypic features.

### Use as Probes in (Gene Mapping)

[0155] Use of nucleic acids encoding the protein of interest for genetically and physically mapping the genes requires only a nucleic acid sequence of at least 15 nucleotides in length. These nucleic acids may be used as restriction fragment length polymorphism (RFLP) markers. Southern blots (Sambrook J, Fritsch E F and Maniatis T (1989) Molecular Cloning, A Laboratory Manual) of restriction-digested plant genomic DNA may be probed with the nucleic acids encoding the protein of interest. The resulting banding patterns may then be subjected to genetic analyses using computer programs such as MapMaker (Lander et al. (1987) Genomics 1: 174-181) in order to construct a genetic map. In addition, the nucleic acids may be used to probe Southern blots containing restriction endonuclease-treated genomic DNAs of a set of individuals representing parent and progeny of a defined genetic cross. Segregation of the DNA polymorphisms is noted and used to calculate the position of the nucleic acid encoding the protein of interest in the genetic map previously obtained using this population (Botstein et al. (1980) Am. J. Hum. Genet. 32:314-331).

[0156] The production and use of plant gene-derived probes for use in genetic mapping is described in Bernatzky and Tanksley (1986) Plant Mol. Biol. Reporter 4: 37-41. Numerous publications describe genetic mapping of specific cDNA clones using the methodology outlined above or variations thereof. For example, F2 intercross populations, backcross populations, randomly mated populations, near isogenic lines, and other sets of individuals may be used for mapping. Such methodologies are well known to those skilled in the art.

[0157] The nucleic acid probes may also be used for physical mapping (i.e., placement of sequences on physical maps; see Hoheisel et al. In: Non-mammalian Genomic Analysis: A Practical Guide, Academic press 1996, pp. 319-346, and references cited therein).

[0158] In another embodiment, the nucleic acid probes may be used in direct fluorescence in situ hybridisation (FISH) mapping (Trask (1991) Trends Genet. 7:149-154). Although current methods of FISH mapping favour use of large clones (several kb to several hundred kb; see Laan et al. (1995) Genome Res. 5:13-20), improvements in sensitivity may allow performance of FISH mapping using shorter probes.

[0159] A variety of nucleic acid amplification-based methods for genetic and physical mapping may be carried out using the nucleic acids. Examples include allele-specific amplification (Kazazian (1989) J. Lab. Clin. Med 11:95-96), polymorphism of PCR-amplified fragments (CAPS; Sheffield et al. (1993) Genomics 16:325-332), allele-specific ligation (Landegren et al. (1988) Science 241:1077-1080), nucleotide extension reactions (Sokolov (1990) Nucleic Acid Res. 18:3671), Radiation Hybrid Mapping (Walter et al. (1997) Nat. Genet. 7:22-28) and Happy Mapping (Dear and Cook (1989) Nucleic Acid Res. 17:6795-6807). For these methods, the sequence of a nucleic acid is used to design and produce primer pairs for use in the amplification reaction or in primer extension reactions. The design of such primers is well known to those skilled in the art. In methods employing PCR-based genetic mapping, it may be necessary to identify DNA sequence differences between the parents of the mapping cross in the region corresponding to the instant nucleic acid sequence. This, however, is generally not necessary for mapping methods.

### Plant

[0160] The term “plant” as used herein encompasses whole plants, ancestors and progeny of the plants and plant parts, including seeds, shoots, stems, leaves, roots (including tubers), flowers, and tissues and organs, wherein each of the aforementioned comprise the gene/nucleic acid of interest. The term “plant” also encompasses plant cells, suspension cultures, callus tissue, embryos, meristematic regions, gametophytes, sporophytes, pollen and microspores, again wherein each of the aforementioned comprises the gene/nucleic acid of interest.

[0161] Plants that are particularly useful in the methods of the invention include all plants which belong to the superfamily Viridiplantae, in particular monocotyledonous and dicotyledonous plants including fodder or forage legumes, ornamental plants, food crops, trees or shrubs selected from the list comprising Acer spp., Actinidia spp., Abelmoschus spp., Agave sisalana, Agropyron spp., Agrostis stolonifera, Allium spp., Amaranthus spp., Ammophila arenaria, Ananas comosus, Annona spp., Apium graveolens, Arachis spp, Artocarpus spp., Asparagus officinalis, Avena spp. (e.g. Avena sativa, Avena fatua, Avena byzantina, Avena fatua var. sativa, Avena hybrida), Averrhoa carambola, Bambusa sp., Benincasa hispida, Bertholletia excelsea, Beta vulgaris, Brassica spp. (e.g. Brassica napus, Brassica rapa ssp. [canola, oilseed rape, turnip rape]), Cadaba farinosa, Camellia sinensis, Canna indica, Cannabis sativa, Capsicum spp., Carex elata, Carica papaya, Carissa macrocarpa, Carya spp., Carthamus tinctorius, Castanea spp., Ceiba pentandra, Cichorium endivia, Cinnamomum spp., Citrullus lanatus, Citrus spp., Cocos spp., Coffea spp., Colocasia esculenta, Cola spp., Corchorus sp., Coriandrum sativum, Corylus spp., Crataegus spp., Crocus sativus, Cucurbita spp., Cucumis spp., Cynara spp., Daucus carota, Desmodium spp., Dimocarpus longan, Dioscorea spp., Diospyros spp., Echinochloa spp., Elaeis (e.g. Elaeis guineensis, Elaeis oleifera), Eleusine coracana, Eragrostis tef, Erianthus sp., Eriobotrya japonica, Eucalyptus sp., Eugenia uniflora, Fagopyrum spp., Fagus spp., Festuca arundinacea, Ficus carica, Fortunella spp., Fragaria spp., Ginkgo biloba, Glycine spp. (e.g. Glycine max, Soja hispida or Soja max), Gossypium hirsutum, Helianthus spp. (e.g. Helianthus annuus), Hemerocallis fulva, Hibiscus spp., Hordeum spp. (e.g. Hordeum vulgare), Ipomoea batatas, Juglans spp., Lactuca sativa, Lathyrus spp., Lens culinaris, Linum usitatissimum, Litchi chinensis, Lotus spp., Luffa acutangula, Lupinus spp., Luzula sylvatica, Lycopersicon spp. (e.g. Lycopersicon esculentum, Lycopersicon lycopersicum, Lycopersicon pyriforme), Macrotyloma spp., Malus spp., Malpighia emarginata, Mammea americana, Mangifera indica, Manihot spp., Manilkara zapota, Medicago sativa, Melilotus spp., Mentha spp., Miscanthus sinensis, Momordica spp., Morus nigra, Musa spp., Nicotiana spp., Olea spp., Opuntia spp., Ornithopus spp., Oryza spp. (e.g. Oryza sativa, Oryza latifolia), Panicum miliaceum, Panicum virgatum, Passiflora edulis, Pastinaca sativa, Pennisetum sp., Persea spp., Petroselinum crispum, Phalaris arundinacea, Phaseolus spp., Phleum pratense, Phoenix spp., Phragmites australis, Physalis spp., Pinus spp., Pistacia vera, Pisum spp., Poa spp., Populus spp., Prosopis spp., Prunus spp., Psidium spp., Punica granatum, Pyrus communis, Quercus spp., Raphanus sativus, Rheum rhabarbarum, Ribes spp., Ricinus communis, Rubus spp., Saccharum spp., Salix sp., Sambucus spp., Secale cereale, Sesamum spp., Sinapis sp., Solanum spp. (e.g. Solanum tuberosum, Solanum integrifolium or Solanum lycopersicum), Sorghum bicolor, Spinacia spp., Syzygium spp., Tagetes spp., Tamarindus indica, Theobroma cacao, Trifolium spp., Tripsacum dactyloides, Triticosecale rimpaui, Triticum spp. (e.g. Triticum aestivum, Triticum durum, Triticum turgidum, Triticum hybemurn, Triticum macha, Triticum sativum, Triticum monococcum or Triticum vulgare), Tropaeolum minus, Tropaeolum majus, Vaccinium spp., Vicia spp., Vigna spp., Viola odorata, Vitis spp., Zea mays, Zizania palustris, Ziziphus spp., amongst others.

### Control Plant(s)

[0162] The choice of suitable control plants is a routine part of an experimental setup and may include corresponding wild type plants or corresponding plants without the gene of interest. The control plant is typically of the same plant species or even of the same variety as the plant to be assessed. The control plant may also be a nullizygote of the plant to be assessed. Nullizygotes (or null control plants) are individuals missing the transgene by segregation. Further, control plants are grown under equal growing conditions to the growing conditions of the plants of the invention, i.e. in the vicinity of, and simultaneously with, the plants of the invention. A “control plant” as used herein refers not only to whole plants, but also to plant parts, including seeds and seed parts.

### DETAILED DESCRIPTION OF THE INVENTION

[0163] Surprisingly, it has now been found that modulating expression in a plant of a nucleic acid encoding a VIM1 polypeptide, or a VTC2-like polypeptide, or a DUF1685 polypeptide, or an ARF6-like polypeptide, gives plants having enhanced yield-related traits relative to control plants.

[0164] According to a first embodiment, the present invention provides a method for enhancing yield-related traits in plants relative to control plants, comprising modulating expression in a plant of a nucleic acid encoding a VIM1 polypeptide, or a VTC2-like polypeptide, and optionally selecting for plants having enhanced yield-related traits. According to another embodiment, the present invention provides a method for producing plants having enhancing yield-related traits relative to control plants, wherein said method comprises the steps of modulating expression in said plant of a nucleic acid encoding a growth-related polypeptide as described herein and optionally selecting for plants having enhanced yield-related traits.

[0165] According to another embodiment, the present invention provides a method for enhancing yield-related traits in plants relative to control plants, comprising modulating expression in a plant of a nucleic acid encoding a DUF1685 polypeptide, or an ARF6-like polypeptide, as defined herein and optionally selecting for plants having enhanced yield-related traits. In another embodiment, the present invention provides a method for producing plants having enhancing yield-related traits relative to control plants, wherein said method comprises the steps of modulating expression in said plant of a nucleic acid encoding a DUF1685 polypeptide, or an ARF6-like polypeptide, as defined herein and optionally selecting for plants having enhanced yield-related traits.

[0166] A preferred method for modulating, preferably increasing, expression of a nucleic acid encoding a VIM1 polypeptide, or a VTC2-like polypeptide, or a DUF1685 polypeptide, or an ARF6-like polypeptide, is by introducing and expressing in a plant a nucleic acid encoding a VIM1 polypeptide, or a VTC2-like polypeptide, or a DUF1685 polypeptide, or an ARF6-like polypeptide.

[0167] Concerning VIM1-like polypeptides, any reference hereinafter to a “protein useful in the methods of the invention” is taken to mean a VIM1-like polypeptide as defined herein. Any reference hereinafter to a “nucleic acid useful in the methods of the invention” is taken to mean a nucleic acid capable of encoding such a VIM1-like polypeptide. The nucleic acid to be introduced into a plant (and therefore useful in performing the methods of the invention) is any nucleic acid encoding the type of protein which will now be described, hereafter also named “VIM1-like nucleic acid” or “VIM1-like gene”.

[0168] The term “VIM1-like” or “VIM1-like polypeptide” as used herein also intends to include homologues as defined hereunder of “VIM1-like polypeptide”.

[0169] A “VIM1-like polypeptide” as defined herein refers to any polypeptide that comprises an Interpro accession IPR019787, corresponding to PFAM accession number SM00249 (plant homeodomain (PHD) domain); an Interpro accession IPR018957, corresponding to PFAM accession number PF00097 (really interesting new gene (RING) domain) and an Interpro accession IPR003105, corresponding to PFAM accession number PF02182 (Set Ring Associated (SRA) domain).

[0170] In a preferred embodiment, the VIM1-like polypeptide comprises one or more of the following motifs:

(i) Motif 1:
(SEQ ID NO: 53)
RQWGAH[LF]PHVAGIAGQS[TA][YHV]GAQSVALSGGY[IED]DD
EDHGEWFLYTGSGGRDL,
(ii) Motif 2:
(SEQ ID NO: 54)
F[DE][KN][ML]N[EA]ALR[LV]SC[LK]KGYPVRVVRSHKEKRS
[AS]YAPE[TES]GV,
(iii) Motif 3:
(SEQ ID NO: 55)
A[YF]TTERAK[KR][AT]GKANA[CSA]SG[KQ]IFVT[VI][AP]
PDHFGPI[PL]AENDP[ET]RN[MQ]GVLVG[ED][IST]W

[0171] Motifs 1 to 3 were derived using the MEME algorithm (Bailey and Elkan, Proceedings of the Second International Conference on Intelligent Systems for Molecular Biology, pp. 28-36, AAAI Press, Menlo Park, Calif., 1994). At each position within a MEME motif, the residues are shown that are present in the query set of sequences with a frequency higher than 0.2. Residues within square brackets represent alternatives.

[0172] More preferably, the VIM1-like polypeptide comprises in increasing order of preference, at least 2, or all 3 motifs.

[0173] Additionally or alternatively, the homologue of a VIM1-like protein has in increasing order of preference at least 25%, 26%, 27%, 28%, 29%, 30%, 31%, 32%, 33%, 34%, 35%, 36%, 37%, 38%, 39%, 40%, 41%, 42%, 43%, 44%, 45%, 46%, 47%, 48%, 49%, 50%, 51%, 52%, 53%, 54%, 55%, 56%, 57%, 58%, 59%, 60%, 61%, 62%, 63%, 64%, 65%, 66%, 67%, 68%, 69%, 70%, 71%, 72%, 73%, 74%, 75%, 76%, 77%, 78%, 79%, 80%, 81%, 82%, 83%, 84%, 85%, 86%, 87%, 88%, 89%, 90%, 91%, 92%, 93%, 94%, 95%, 96%, 97%, 98%, or 99% overall sequence identity to the amino acid represented by SEQ ID NO: 2, provided that the homologous protein comprises any one or more of the conserved motifs as outlined above. The overall sequence identity is determined using a global alignment algorithm, such as the Needleman Wunsch algorithm in the program GAP (GCG Wisconsin Package, Accelrys), preferably with default parameters and preferably with sequences of mature proteins (i.e. without taking into account secretion signals or transit peptides). Compared to overall sequence identity, the sequence identity will generally be higher when only conserved domains or motifs are considered. Preferably the motifs in a VIM1-like polypeptide have, in increasing order of preference, at least 70%, 71%, 72%, 73%, 74%, 75%, 76%, 77%, 78%, 79%, 80%, 81%, 82%, 83%, 84%, 85%, 86%, 87%, 88%, 89%, 90%, 91%, 92%, 93%, 94%, 95%, 96%, 97%, 98%, or 99% sequence identity to any one or more of the motifs represented by SEQ ID NO: 53 to SEQ ID NO: 55 (Motifs 1 to 3).

[0174] In other words, in another embodiment a method is provided wherein said VIM1-like polypeptide comprises a conserved domain (or motif) with at least 70%, 71%, 72%, 73%, 74%, 75%, 76%, 77%, 78%, 79%, 80%, 81%, 82%, 83%, 84%, 85%, 86%, 87%, 88%, 89%, 90%, 91%, 92%, 93%, 94%, 95%, 96%, 97%, 98%, or 99% sequence identity to a conserved domain of amino acid coordinates 265 to 415, 135 to 173, 508 to 564 and/or 10 to 57 of SEQ ID NO:2).

[0175] Concerning VTC2-like polypeptides, any reference hereinafter to a “protein useful in the methods of the invention” is taken to mean a VTC2-like polypeptide as defined herein. Any reference hereinafter to a “nucleic acid useful in the methods of the invention” is taken to mean a nucleic acid capable of encoding such a VTC2-like polypeptide. The nucleic acid to be introduced into a plant (and therefore useful in performing the methods of the invention) is any nucleic acid encoding the type of protein which will now be described, hereafter also named “VTC2-like nucleic acid” or “VTC2-like gene”.

[0176] A “VTC2-like polypeptide” as defined herein refers to any polypeptide having GDP-L-galactose phosphorylase activity (Enzyme Class EC 2.7.7., Laing et al. (2007)). The enzyme catalyses the following reaction:

GDP-L-galactose+phosphate [symbol] alpha-L-galactose 1-phosphate+GDP

[0177] Preferably, the VTC2-like also comprises a HMMPanther PTHR 20884:SF3 and/or a PTHR20884 domain. Additionally or alternatively, the VTC2-like also comprises one or more of the following motifs:

Motif 4 (SEQ ID NO: 168):
WEDR[MFV][QA]RGLFRYDVTACETKVIPG[KE][LY]GF[IV]AQL
NEGRHLKKRPTEFRVD[KRQ]V
Motif 5 (SEQ ID NO: 169):
[DE][CR]LPQ[QR]ID[HPR][EKD]S[FL]LLA[VL][HYQ]MAAEA
[GA][NS]PYFR[LV]GYNSLGAFATINHLHFQAYYL
Motif 6 (SEQ ID NO: 170):
D[CS]G[KR][QR][IV]F[VL][LMF]PQCYAEKQALGEVS[PQ][DE]
[VL]L[DE]TQVNPAVWEISGH[MI]VLKR[KR][ETK]D[FY]

[0178] In a preferred embodiment, the VTC2-like also comprises one or more of the following motifs:

Motif 7 (SEQ ID NO: 171):
WEDR[FVM][QA]RGLFRYDVTACETKVIPG[KE][YLH]GF[IV]AQ
LNEGRHLKKRPTEFRVD[RK]V
Motif 8 (SEQ ID NO: 172):
[DE][CR]LPQ[QR]ID[HPR][KE]S[FL]LLA[VL][HY]MAAEA
[AG][NS]PYFRLGYNSLGAFATINHLHFQAYYL
Motif 9 (SEQ ID NO: 173):
QCYAEKQALGEVS[QP]ELLDTQVNPAVWEISGH[MI]VLKR[KR]
[KTE]D[FY][ED][EG]ASE[EDA][SN]AWR

[0179] In a more preferred embodiment, the VTC2-like comprises preferably one or more of the following motifs:

Motif 10 (SEQ ID NO: 174):
D[RC]LPQ[QR][IV]D[PQ]ESFLLA[LM][YHQ][MV]A[AR]EA[AR]
[SN]P[YF]FR[LV]GYNSLG[AG]FATINHLHFQAYYL
Motif 11 (SEQ ID NO: 175):
W[ED]DR[KVM][AT]RGLF[RH][YH]D[VI][TS][AS]CETKV[IL]PG
[EN][LH][GN]FVA[QT]L[NI]EGR[HD][LQ]KKRPTEF[RG][VM][DN][RQ]V
Motif 12 (SEQ ID NO: 176):
PQCYAEKQALG[EK][VA]SQ[DE][LF]LD[TM][QR][VI]NPAVWE
[IL]SGH[IL]VLKRR[TK]D[FY][ED]EASE[AT][ST][AI][WC]
Motif 13 (SEQ ID NO: 177):
WEDR[FM]QRGLFRYDVTACETKVIPG[KE]YGF[IV]AQLN
EGRHLKKRPTEFRVDKV
Motif 14 (SEQ ID NO: 178):
CLPQRID[HR][EDK]S[FL]LLA[VL][HY]MAAEA[GA][NS]PYFR
LGYNSLGAFATINHLHFQAYYLA
Motif 15 (SEQ ID NO: 179):
QCYAEKQALGEVS[PAQS]E[VL]L[ED]TQVNPAVWEISGH[MI]
VLKRK[EK]DYE[EG]ASE[DE]NAWR

[0180] The term “VTC2-like” or “VTC2-like polypeptide” as used herein also intends to include homologues as defined hereunder of “VTC2-like polypeptide”.

[0181] Motifs 4 to 15 were derived using the MEME algorithm (Bailey and Elkan, Proceedings of the Second International Conference on Intelligent Systems for Molecular Biology, pp. 28-36, AAAI Press, Menlo Park, Calif., 1994). At each position within a MEME motif, the residues are shown that are present in the query set of sequences with a frequency higher than 0.2. Residues within square brackets represent alternatives.

[0182] More preferably, the VTC2-like polypeptide comprises in increasing order of preference, at least 2, at least 3, at least 4, at least 5, at least 6, at least 7, at least 8, at least 9, at least 10, at least 11, or all 12 motifs.

[0183] Additionally or alternatively, the homologue of a VTC2-like protein has in increasing order of preference at least 25%, 26%, 27%, 28%, 29%, 30%, 31%, 32%, 33%, 34%, 35%, 36%, 37%, 38%, 39%, 40%, 41%, 42%, 43%, 44%, 45%, 46%, 47%, 48%, 49%, 50%, 51%, 52%, 53%, 54%, 55%, 56%, 57%, 58%, 59%, 60%, 61%, 62%, 63%, 64%, 65%, 66%, 67%, 68%, 69%, 70%, 71%, 72%, 73%, 74%, 75%, 76%, 77%, 78%, 79%, 80%, 81%, 82%, 83%, 84%, 85%, 86%, 87%, 88%, 89%, 90%, 91%, 92%, 93%, 94%, 95%, 96%, 97%, 98%, or 99% overall sequence identity to the amino acid sequence represented by SEQ ID NO: 61, provided that the homologous protein comprises any one or more of the conserved motifs as outlined above. The overall sequence identity is determined using a global alignment algorithm, such as the Needleman Wunsch algorithm in the program GAP (GCG Wisconsin Package, Accelrys), preferably with default parameters and preferably with sequences of mature proteins (i.e. without taking into account secretion signals or transit peptides). Compared to overall sequence identity, the sequence identity will generally be higher when only conserved domains or motifs are considered. Preferably the motifs in a VTC2-like polypeptide have, in increasing order of preference, at least 70%, 71%, 72%, 73%, 74%, 75%, 76%, 77%, 78%, 79%, 80%, 81%, 82%, 83%, 84%, 85%, 86%, 87%, 88%, 89%, 90%, 91%, 92%, 93%, 94%, 95%, 96%, 97%, 98%, or 99% sequence identity to any one or more of the motifs represented by SEQ ID NO: 168 to SEQ ID NO: 179 (Motifs 4 to 15).

[0184] In other words, in another embodiment a method is provided wherein said VTC2-like polypeptide comprises a conserved domain (or motif) with at least 70%, 71%, 72%, 73%, 74%, 75%, 76%, 77%, 78%, 79%, 80%, 81%, 82%, 83%, 84%, 85%, 86%, 87%, 88%, 89%, 90%, 91%, 92%, 93%, 94%, 95%, 96%, 97%, 98%, or 99% sequence identity to the conserved PTHR 20884:SF3 or PTHR20884 domain spanning amino acid 2 to 442 in SEQ ID NO: 61 or amino acids 5 to 426 in SEQ ID NO: 63 (see FIG. 6).

[0185] Concerning DUF1685 polypeptides, any reference hereinafter to a “protein useful in the methods of the invention” is taken to mean a DUF1685 polypeptide as defined herein. Any reference hereinafter to a “nucleic acid useful in the methods of the invention” is taken to mean a nucleic acid capable of encoding such a DUF1685 polypeptide. The nucleic acid to be introduced into a plant (and therefore useful in performing the methods of the invention) is any nucleic acid encoding the type of protein which will now be described, hereafter also named “DUF1685 nucleic acid” or “DUF1685 gene”.

[0186] A “DUF1685 polypeptide” as defined herein refers to any polypeptide belonging to the HOMO00944 gene family (as determined using PLAZA: a comparative genomics resource to study gene and genome evolution in plants, see The Plant Cell 21: 3718-3731). This family comprises several subfamilies, including the following subfamilies: ORTHO008516; ORTHO003703; ORTHO011913; ORTHO016869; ORTHO017066; and ORTHO020539. In a preferred embodiment, a DUF1685 polypeptide as defined herein belongs to the ORTHO008516 subfamily.

[0187] In another embodiment, a DUF1685 polypeptide as provided herein comprises a conserved domain having at least 50% amino acid sequence identity to a DUF1685 domain as represented by amino acid coordinates 46 to 144 of SEQ ID NO: 188. For instance, a DUF1685 polypeptide as provided herein comprises a conserved domain with at least 50%, 51%, 52%, 53%, 54%, 55%, 56%, 57%, 58%, 59%, 60%, 61%, 62%, 63%, 64%, 65%, 66%, 67%, 68%, 69%, 70%, 71%, 72%, 73%, 74%, 75%, 76%, 77%, 78%, 79%, 80%, 81%, 82%, 83%, 84%, 85%, 86%, 87%, 88%, 89%, 90%, 91%, 92%, 93%, 94%, 95%, 96%, 97%, 98%, or 99% sequence identity to a conserved domain (the DUF1685 domain) of amino acid coordinates 46 to 144 of SEQ ID NO: 188. In other words, a DUF1685 polypeptide as provided herein comprises a conserved domain having at least 50%, 51%, 52%, 53%, 54%, 55%, 56%, 57%, 58%, 59%, 60%, 61%, 62%, 63%, 64%, 65%, 66%, 67%, 68%, 69%, 70%, 71%, 72%, 73%, 74%, 75%, 76%, 77%, 78%, 79%, 80%, 81%, 82%, 83%, 84%, 85%, 86%, 87%, 88%, 89%, 90%, 91%, 92%, 93%, 94%, 95%, 96%, 97%, 98%, or 99% amino acid sequence identity to a DUF1685 domain as represented by SEQ ID NO: 256.

[0188] The term “DUF1685” or “DUF1685 polypeptide” as used herein also intends to include homologues as defined hereunder of a “DUF1685 polypeptide”.

[0189] Additionally or alternatively, the homologue of a DUF1685 polypeptide has in increasing order of preference at least 25%, 26%, 27%, 28%, 29%, 30%, 31%, 32%, 33%, 34%, 35%, 36%, 37%, 38%, 39%, 40%, 41%, 42%, 43%, 44%, 45%, 46%, 47%, 48%, 49%, 50%, 51%, 52%, 53%, 54%, 55%, 56%, 57%, 58%, 59%, 60%, 61%, 62%, 63%, 64%, 65%, 66%, 67%, 68%, 69%, 70%, 71%, 72%, 73%, 74%, 75%, 76%, 77%, 78%, 79%, 80%, 81%, 82%, 83%, 84%, 85%, 86%, 87%, 88%, 89%, 90%, 91%, 92%, 93%, 94%, 95%, 96%, 97%, 98%, or 99% overall sequence identity to the amino acid represented by SEQ ID NO: 188, provided that the homologous protein comprises the conserved DUF1685 motif as outlined above. The overall sequence identity is determined using a global alignment algorithm, such as the Needleman Wunsch algorithm in the program GAP (GCG Wisconsin Package, Accelrys), preferably with default parameters and preferably with sequences of mature proteins (i.e. without taking into account secretion signals or transit peptides). Compared to overall sequence identity, the sequence identity will generally be higher when only conserved domains or motifs are considered. Preferably the conserved domain in a DUF1685 polypeptide has, in increasing order of preference, at least 50%, 51%, 52%, 53%, 54%, 55%, 56%, 57%, 58%, 59%, 60%, 61%, 62%, 63%, 64%, 65%, 66%, 67%, 68%, 69%, 70%, 71%, 72%, 73%, 74%, 75%, 76%, 77%, 78%, 79%, 80%, 81%, 82%, 83%, 84%, 85%, 86%, 87%, 88%, 89%, 90%, 91%, 92%, 93%, 94%, 95%, 96%, 97%, 98%, or 99% sequence identity to the domain represented by SEQ ID NO: 256.

[0190] In a preferred embodiment, said DUF1685 polypeptide comprises a Motif 16 as represented by DLTDEDLHELKGCIELGFGF (SEQ ID NO: 258) and/or a Motif 17 as represented by LTNTLPALDLYFAV (SEQ ID NO: 259).

[0191] Concerning ARF6-like polypeptides, any reference hereinafter to a “protein useful in the methods of the invention” is taken to mean a ARF6-like polypeptide as defined herein. Any reference hereinafter to a “nucleic acid useful in the methods of the invention” is taken to mean a nucleic acid capable of encoding such a ARF6-like polypeptide. The nucleic acid to be introduced into a plant (and therefore useful in performing the methods of the invention) is any nucleic acid encoding the type of protein which will now be described, hereafter also named “ARF6-like nucleic acid” or “ARF6-like gene”.

[0192] A “ARF6-like polypeptide” as defined herein refers to any ARF-like polypeptide which comprises a B3 DNA binding domain, a Q-rich domain, an auxin-responsive domain III and Aux/IAA family domain IV.

[0193] In a preferred embodiment, the B3 DNA binding domain corresponds to Pfam PF02362. In a further preferred embodiment, the auxin-responsive domain III corresponds to Pfam PF06507. In a further preferred embodiment, the Aux/IAA family domain corresponds to PF02309.

[0194] In a particularly preferred embodiment, the ARF6-like polypeptide comprises one or both of the following motifs, or homologues thereof as defined in the definition section:

Motif 18:
(SEQ ID NO: 304)
VYFPQGHSEQVAAST
or a homologue thereof.
Motif 19:
(SEQ ID NO: 305)
ATFVKVYK
or a homologue thereof.
Motif 20:
(SEQ ID NO: 306)
FCKTLTASDTSTHGGFSVPRRAAEKVFPPLDFTQQPPAQELMAKDLHGNEWK
FRHIFRGQPKRHLLTTGWSVFVSAKRLVAGDSVLFIWNDSNQLLLGIRRA.
Motif 21:
(SEQ ID NO: 307)
AAHAASTNSRFTIFYNPRASPSEFVIPLAKYVKAVYHTRISV.
Motif 22:
(SEQ ID NO: 308)
QNTGFQSLNFGGLGMSPWMQPRLDSSLLGLQPDMYQTIAAAAALQNTTKQVS
PAMLQFQQPQNIVGRSSLLSSQILQQAQPQFQQMYHQNINGNSIQGHSQPEYLQQPLQH
CQSFNEQKPQLQPQQQQQESHQQQPQHQQMQQQKHLSNFQTVPNALSVFSQLSSTPQ
STPSTLQTVSPFSQQ.
Motif 23:
(SEQ ID NO: 309)
QVKRPHATFVKVYKSGTVGRLLDITRFSSYHELRSEVGRLFGLEGQLEDPLRSG
WQLVFVDREDDVLLVGDDPWQEFVNSVSCIKILSPQEVQQMG.

[0195] The term “ARF6-like” or “ARF6-like polypeptide” as used herein also intends to include homologues as defined hereunder of “ARF6-like polypeptide”.

[0196] More preferably, the ARF6-like polypeptide comprises in increasing order of preference, at least 2, at least 3, at least 4, at least 5, or all 6 motifs.

[0197] Additionally or alternatively, the homologue of a ARF6-like protein has in increasing order of preference at least 25%, 26%, 27%, 28%, 29%, 30%, 31%, 32%, 33%, 34%, 35%, 36%, 37%, 38%, 39%, 40%, 41%, 42%, 43%, 44%, 45%, 46%, 47%, 48%, 49%, 50%, 51%, 52%, 53%, 54%, 55%, 56%, 57%, 58%, 59%, 60%, 61%, 62%, 63%, 64%, 65%, 66%, 67%, 68%, 69%, 70%, 71%, 72%, 73%, 74%, 75%, 76%, 77%, 78%, 79%, 80%, 81%, 82%, 83%, 84%, 85%, 86%, 87%, 88%, 89%, 90%, 91%, 92%, 93%, 94%, 95%, 96%, 97%, 98%, or 99% overall sequence identity to the amino acid represented by SEQ ID NO: 261, provided that the homologous protein comprises any one or more of the conserved motifs as outlined above. The overall sequence identity is determined using a global alignment algorithm, such as the Needleman Wunsch algorithm in the program GAP (GCG Wisconsin Package, Accelrys), preferably with default parameters and preferably with sequences of mature proteins (i.e. without taking into account secretion signals or transit peptides). Compared to overall sequence identity, the sequence identity will generally be higher when only conserved domains or motifs are considered. Preferably the motifs in a ARF6-like polypeptide have, in increasing order of preference, at least 70%, 71%, 72%, 73%, 74%, 75%, 76%, 77%, 78%, 79%, 80%, 81%, 82%, 83%, 84%, 85%, 86%, 87%, 88%, 89%, 90%, 91%, 92%, 93%, 94%, 95%, 96%, 97%, 98%, or 99% sequence identity to any one or more of the motifs represented by SEQ ID NO: 304 to SEQ ID NO: 309 (Motifs 18 to 23).

[0198] In other words, in another embodiment a method is provided wherein said ARF6-like polypeptide comprises a conserved domain (or motif) with at least 70%, 71%, 72%, 73%, 74%, 75%, 76%, 77%, 78%, 79%, 80%, 81%, 82%, 83%, 84%, 85%, 86%, 87%, 88%, 89%, 90%, 91%, 92%, 93%, 94%, 95%, 96%, 97%, 98%, or 99% sequence identity to the conserved domain starting with amino acid 134 up to amino acid 236 in SEQ ID NO: 261).

[0199] In another embodiment a method is provided wherein said ARF6-like polypeptide comprises a conserved domain (or motif) with at least 70%, 71%, 72%, 73%, 74%, 75%, 76%, 77%, 78%, 79%, 80%, 81%, 82%, 83%, 84%, 85%, 86%, 87%, 88%, 89%, 90%, 91%, 92%, 93%, 94%, 95%, 96%, 97%, 98%, or 99% sequence identity to the conserved domain starting with amino acid 260 up to amino acid 343 in SEQ ID NO: 261).

[0200] In another embodiment a method is provided wherein said ARF6-like polypeptide comprises a conserved domain (or motif) with at least 70%, 71%, 72%, 73%, 74%, 75%, 76%, 77%, 78%, 79%, 80%, 81%, 82%, 83%, 84%, 85%, 86%, 87%, 88%, 89%, 90%, 91%, 92%, 93%, 94%, 95%, 96%, 97%, 98%, or 99% sequence identity to the conserved domain starting with amino acid 729 up to amino acid 868 in SEQ ID NO: 261).

[0201] The terms “domain”, “signature” and “motif” are defined in the “definitions” section herein.

[0202] Concerning VIM1-like polypeptides, the polypeptide sequence which when used in the construction of a phylogenetic tree, such as the one depicted in FIG. 3, preferably clusters with the group of VIM1-like polypeptides comprising the amino acid sequence represented by SEQ ID NO: 2, rather than with any other group.

[0203] Furthermore, VIM1-like polypeptides (at least in their native form) typically have E3 ligase activity. Tools and techniques for measuring E3 ligase activity are well known in the art, such as e.g. described in Kraft et al., The Plant Journal (2008) 56, 704-715.

[0204] In addition, VIM1-like polypeptides, when expressed in transgenic rice plants according to the methods of the present invention as outlined in the Examples section, give plants having increased yield related traits, in particular GravityYMax, which is the height of the gravity centre of the leafy biomass and HeightMax, which is the height of the highest tip of the plant; and for seed yield, including total weight of seeds, number of filled seeds, fill rate and harvest index.

[0205] Concerning VTC2-like polypeptides, the polypeptide sequence which when used in the construction of a phylogenetic tree, such as the one depicted in FIG. 8, preferably clusters with the group of monocotyledonous (monocots) or dicotyledonous (dicots) VTC2-like polypeptides comprising the amino acid sequence represented by SEQ ID NO: 61 (At4g26850) or SEQ ID NO: 63 (Triticum aestivum TC292154), rather than with any other group.

[0206] Furthermore, VTC2-like polypeptides (at least in their native form) typically have GDP-L-galactose phosphorylase activity. Tools and techniques for measuring GDP-L-galactose phosphorylase activity are well known in the art (Linster et al., J. Biol. Chem. 282: 18879-85 (2007)). Further details are provided in the Examples section.

[0207] In addition, VTC2-like polypeptides, when expressed in transgenic plants such as e.g. rice according to the methods of the present invention as outlined in the Examples section, give plants having increased yield related traits, in particular one or more of total weight of seeds, fillrate, harvest index, number of filled seeds or thousand kernel weight.

[0208] Concerning DUF1685 polypeptides, in an embodiment, a DUF1685 polypeptide as provided herein has a sequence which clusters with a group of DUF1685 polypeptides comprising the amino acid sequence represented by SEQ ID NO: 188 rather than with any other group. In a preferred embodiment a DUF1685 polypeptide as provided herein is selected from the group comprising SEQ ID NO: 188, 192, 216, 222, 236, 246, and 250.

[0209] In addition, DUF1685 polypeptides, when expressed in transgenic plants such as e.g. rice according to the methods of the present invention as outlined in the Examples section, give plants having increased yield related traits as compared to control plants, in particular increase seed yield, and for instance increased total seed weight, increased fill rate, increased thousand kernel weight and increased harvest index.

[0210] Concerning ARF6-like polypeptides, furthermore, ARF6-like polypeptides (at least in their native form) typically have transcription factor activity. Tools and techniques for measuring transcription factor activity are well known in the art and are also commercially available (see for example “TransFactor Universal Kits” available from Clontech). In a preferred embodiment, the ARF6-like polypeptides activate transcription.

[0211] In addition, ARF6-like polypeptides, when expressed in rice according to the methods of the present invention as outlined in the Examples section, give plants having increased yield related traits, in particular enhanced growth, increased growth rate, increased biomass, increased leaf biomass, increased root biomass, increased tillering and increased yield.

[0212] Concerning VIM1-like polypeptides, the present invention is illustrated by transforming plants with the nucleic acid sequence represented by SEQ ID NO: 1, encoding the polypeptide sequence of SEQ ID NO: 2. However, performance of the invention is not restricted to these sequences; the methods of the invention may advantageously be performed using any VIM1-like-encoding nucleic acid or VIM1-like polypeptide as defined herein.

[0213] Examples of nucleic acids encoding VIM1-like polypeptides are given in Table A1 of the Examples section herein. Such nucleic acids are useful in performing the methods of the invention. The amino acid sequences given in Table A1 of the Examples section are example sequences of orthologues and paralogues of the VIM1-like polypeptide represented by SEQ ID NO: 2, the terms “orthologues” and “paralogues” being as defined herein. Further orthologues and paralogues may readily be identified by performing a so-called reciprocal blast search as described in the definitions section; where the query sequence is SEQ ID NO: 1 or SEQ ID NO: 2, the second BLAST (back-BLAST) would be against poplar sequences.

[0214] The invention also provides hitherto unknown VIM1-like-encoding nucleic acids and VIM1-like polypeptides useful for conferring enhanced yield-related traits in plants relative to control plants.

[0215] According to a further embodiment of the present invention, there is therefore provided an isolated nucleic acid molecule selected from:
[0216] (i) a nucleic acid represented by SEQ ID NO: 1;
[0217] (ii) the complement of a nucleic acid represented by SEQ ID NO: 1;
[0218] (iii) a nucleic acid encoding a VIM1-like polypeptide having in increasing order of preference at least 50%, 51%, 52%, 53%, 54%, 55%, 56%, 57%, 58%, 59%, 60%, 61%, 62%, 63%, 64%, 65%, 66%, 67%, 68%, 69%, 70%, 71%, 72%, 73%, 74%, 75%, 76%, 77%, 78%, 79%, 80%, 81%, 82%, 83%, 84%, 85%, 86%, 87%, 88%, 89%, 90%, 91%, 92%, 93%, 94%, 95%, 96%, 97%, 98%, or 99% sequence identity to the amino acid sequence represented by SEQ ID NO: 2, and additionally or alternatively comprising one or more motifs having in increasing order of preference at least 50%, 55%, 60%, 65%, 70%, 75%, 80%, 85%, 90%, 95%, 96%, 97%, 98%, 99% or more sequence identity to any one or more of the motifs given in SEQ ID NO: 53 to SEQ ID NO: 55, and further preferably conferring enhanced yield-related traits relative to control plants.
[0219] (iv) a nucleic acid molecule which hybridizes with a nucleic acid molecule of (i) to (iii) under high stringency hybridization conditions and preferably confers enhanced yield-related traits relative to control plants.

[0220] According to a further embodiment of the present invention, there is also provided an isolated polypeptide selected from:
[0221] (i) an amino acid sequence represented by SEQ ID NO: 2;
[0222] (ii) an amino acid sequence having, in increasing order of preference, at least 36%, 37%, 38%, 39%, 40%, 41%, 42%, 43%, 44%, 45%, 46%, 47%, 48%, 49%, 50%, 51%, 52%, 53%, 54%, 55%, 56%, 57%, 58%, 59%, 60%, 61%, 62%, 63%, 64%, 65%, 66%, 67%, 68%, 69%, 70%, 71%, 72%, 73%, 74%, 75%, 76%, 77%, 78%, 79%, 80%, 81%, 82%, 83%, 84%, 85%, 86%, 87%, 88%, 89%, 90%, 91%, 92%, 93%, 94%, 95%, 96%, 97%, 98%, or 99% sequence identity to the amino acid sequence represented by SEQ ID NO: 2, and additionally or alternatively comprising one or more motifs having in increasing order of preference at least 50%, 55%, 60%, 65%, 70%, 75%, 80%, 85%, 90%, 95%, 96%, 97%, 98%, 99% or more sequence identity to any one or more of the motifs given in SEQ ID NO: 53 to SEQ ID NO: 55, and further preferably conferring enhanced yield-related traits relative to control plants;
[0223] (iii) derivatives of any of the amino acid sequences given in (i) or (ii) above.

[0224] Concerning VTC2-like polypeptides, the present invention is illustrated by transforming plants with the nucleic acid sequence represented by SEQ ID NO: 60, encoding the polypeptide sequence of SEQ ID NO: 61. However, performance of the invention is not restricted to these sequences; the methods of the invention may advantageously be performed using any VTC2-like-encoding nucleic acid or VTC2-like polypeptide as defined herein.

[0225] Examples of nucleic acids encoding VTC2-like polypeptides are given in Table A2 of the Examples section herein. Such nucleic acids are useful in performing the methods of the invention. The amino acid sequences given in Table A2 of the Examples section are example sequences of orthologues and paralogues of the VTC2-like polypeptide represented by SEQ ID NO: 61, the terms “orthologues” and “paralogues” being as defined herein. Further orthologues and paralogues may readily be identified by performing a so-called reciprocal blast search as described in the definitions section; where the query sequence is SEQ ID NO: 60 or SEQ ID NO: 61, the second BLAST (back-BLAST) would be against Arabidopsis thaliana sequences, where the query sequence is SEQ ID NO: 62 or SEQ ID NO: 63, the second BLAST (back-BLAST) would be against Triticum aestivum sequences.

[0226] Concerning DUF1685 polypeptides, the present invention is illustrated by transforming plants with the nucleic acid sequence represented by SEQ ID NO: 187, encoding the polypeptide sequence of SEQ ID NO: 188. However, performance of the invention is not restricted to these sequences; the methods of the invention may advantageously be performed using any DUF1685-encoding nucleic acid or DUF1685 polypeptide as defined herein.

[0227] Examples of nucleic acids encoding DUF1685 polypeptides are given in Table A3 of the Examples section herein. Such nucleic acids are useful in performing the methods of the invention. The amino acid sequences given in Table A3 of the Examples section are example sequences of orthologues and paralogues of the DUF1685 polypeptide represented by SEQ ID NO: 188, the terms “orthologues” and “paralogues” being as defined herein. Further orthologues and paralogues may readily be identified by performing a so-called reciprocal blast search as described in the definitions section; where the query sequence is SEQ ID NO: 187 or SEQ ID NO: 188, the second BLAST (back-BLAST) would be against poplar sequences.

[0228] Concerning ARF6-like polypeptides, the present invention is illustrated by transforming plants with the nucleic acid sequence represented by SEQ ID NO: 260, encoding the polypeptide sequence of SEQ ID NO: 261. However, performance of the invention is not restricted to these sequences; the methods of the invention may advantageously be performed using any ARF6-like-encoding nucleic acid or ARF6-like polypeptide as defined herein.

[0229] Examples of nucleic acids encoding ARF6-like polypeptides are given in Table A4 of the Examples section herein. Such nucleic acids are useful in performing the methods of the invention. The amino acid sequences given in Table A4 of the Examples section are example sequences of orthologues and paralogues of the ARF6-like polypeptide represented by SEQ ID NO: 261, the terms “orthologues” and “paralogues” being as defined herein. Further orthologues and paralogues may readily be identified by performing a so-called reciprocal blast search as described in the definitions section; where the query sequence is SEQ ID NO: 260 or SEQ ID NO: 261, the second BLAST (back-BLAST) would be against rice sequences.

[0230] The invention also provides hitherto unknown ARF6-like-encoding nucleic acids and ARF6-like polypeptides useful for conferring enhanced yield-related traits in plants relative to control plants.

[0231] According to a further embodiment of the present invention, there is therefore provided an isolated nucleic acid molecule selected from:
[0232] (i) a nucleic acid represented by (any one of) SEQ ID NO: 260;
[0233] (ii) the complement of a nucleic acid represented by (any one of) SEQ ID NO: 260;
[0234] (iii) a nucleic acid encoding the polypeptide as represented by (any one of) SEQ ID NO: 261, preferably as a result of the degeneracy of the genetic code, said isolated nucleic acid can be derived from a polypeptide sequence as represented by (any one of) SEQ ID NO: 261 and further preferably confers enhanced yield-related traits relative to control plants;
[0235] (iv) a nucleic acid having, in increasing order of preference at least 30%, 31%, 32%, 33%, 34%, 35%, 36%, 37%, 38%, 39%, 40%, 41%, 42%, 43%, 44%, 45%, 46%, 47%, 48%, 49%, 50%, 51%, 52%, 53%, 54%, 55%, 56%, 57%, 58%, 59%, 60%, 61%, 62%, 63%, 64%, 65%, 66%, 67%, 68%, 69%, 70%, 71%, 72%, 73%, 74%, 75%, 76%, 77%, 78%, 79%, 80%, 81%, 82%, 83%, 84%, 85%, 86%, 87%, 88%, 89%, 90%, 91%, 92%, 93%, 94%, 95%, 96%, 97%, 98%, or 99% sequence identity with any of the nucleic acid sequences of Table A4 and further preferably conferring enhanced yield-related traits relative to control plants;
[0236] (v) a nucleic acid molecule which hybridizes with a nucleic acid molecule of (i) to (iv) under stringent hybridization conditions and preferably confers enhanced yield-related traits relative to control plants;
[0237] (vi) a nucleic acid encoding a ARF6-like polypeptide having, in increasing order of preference, at least 50%, 51%, 52%, 53%, 54%, 55%, 56%, 57%, 58%, 59%, 60%, 61%, 62%, 63%, 64%, 65%, 66%, 67%, 68%, 69%, 70%, 71%, 72%, 73%, 74%, 75%, 76%, 77%, 78%, 79%, 80%, 81%, 82%, 83%, 84%, 85%, 86%, 87%, 88%, 89%, 90%, 91%, 92%, 93%, 94%, 95%, 96%, 97%, 98%, or 99% sequence identity to the amino acid sequence represented by (any one of) SEQ ID NO: 261 and any of the other amino acid sequences in Table A4 and preferably conferring enhanced yield-related traits relative to control plants.

[0238] According to a further embodiment of the present invention, there is also provided an isolated polypeptide selected from:
[0239] (i) an amino acid sequence represented by (any one of) SEQ ID NO: 261;
[0240] (ii) an amino acid sequence having, in increasing order of preference, at least 50%, 51%, 52%, 53%, 54%, 55%, 56%, 57%, 58%, 59%, 60%, 81%, 62%, 63%, 64%, 65%, 66%, 67%, 68%, 69%, 70%, 71%, 72%, 73%, 74%, 75%, 76%, 77%, 78%, 79%, 80%, 81%, 82%, 83%, 84%, 85%, 86%, 87%, 88%, 89%, 90%, 91%, 92%, 93%, 94%, 95%, 96%, 97%, 98%, or 99% sequence identity to the amino acid sequence represented by (any one of) SEQ ID NO: 261 and any of the other amino acid sequences in Table A4 and preferably conferring enhanced yield-related traits relative to control plants.
[0241] (iii) derivatives of any of the amino acid sequences given in (i) or (ii) above.

[0242] Nucleic acid variants may also be useful in practising the methods of the invention. Examples of such variants include nucleic acids encoding homologues and derivatives of any one of the amino acid sequences given in Table A1 to A4 of the Examples section, the terms “homologue” and “derivative” being as defined herein. Also useful in the methods of the invention are nucleic acids encoding homologues and derivatives of orthologues or paralogues of any one of the amino acid sequences given in Table A1 to A4 of the Examples section. Homologues and derivatives useful in the methods of the present invention have substantially the same biological and functional activity as the unmodified protein from which they are derived. Further variants useful in practising the methods of the invention are variants in which codon usage is optimised or in which miRNA target sites are removed.

[0243] Further nucleic acid variants useful in practising the methods of the invention include portions of nucleic acids encoding VIM1 polypeptides, or VTC2-like polypeptides, or DUF1685 polypeptides, or ARF6-like polypeptides, nucleic acids hybridising to nucleic acids encoding VIM1 polypeptides, or VTC2-like polypeptides, or DUF1685 polypeptides, or ARF6-like polypeptides, splice variants of nucleic acids encoding VIM1 polypeptides, or VTC2-like polypeptides, or DUF1685 polypeptides, or ARF6-like polypeptides, allelic variants of nucleic acids encoding VIM1 polypeptides, or VTC2-like polypeptides, or DUF1685 polypeptides, or ARF6-like polypeptides, and variants of nucleic acids encoding VIM1 polypeptides, or VTC2-like polypeptides, or DUF1685 polypeptides, or ARF6-like polypeptides, obtained by gene shuffling. The terms hybridising sequence, splice variant, allelic variant and gene shuffling are as described herein.

[0244] Nucleic acids encoding VIM1 polypeptides, or VTC2-like polypeptides, or DUF1685 polypeptides, or ARF6-like polypeptides, need not be full-length nucleic acids, since performance of the methods of the invention does not rely on the use of full-length nucleic acid sequences. According to the present invention, there is provided a method for enhancing yield-related traits in plants, comprising introducing and expressing in a plant a portion of any one of the nucleic acid sequences given in Table A1 to A4 of the Examples section, or a portion of a nucleic acid encoding an orthologue, paralogue or homologue of any of the amino acid sequences given in Table A1 to A4 of the Examples section.

[0245] A portion of a nucleic acid may be prepared, for example, by making one or more deletions to the nucleic acid. The portions may be used in isolated form or they may be fused to other coding (or non-coding) sequences in order to, for example, produce a protein that combines several activities. When fused to other coding sequences, the resultant polypeptide produced upon translation may be bigger than that predicted for the protein portion.

[0246] Concerning VIM1-like polypeptides, portions useful in the methods of the invention, encode a VIM1-like polypeptide as defined herein, and have substantially the same biological activity as the amino acid sequences given in Table A1 of the Examples section. Preferably, the portion is a portion of any one of the nucleic acids given in Table A1 of the Examples section, or is a portion of a nucleic acid encoding an orthologue or paralogue of any one of the amino acid sequences given in Table A1 of the Examples section. Preferably the portion is at least 500, 550, 600, 650, 700, 750, 800, 850, 900, 950, 1000, 1050, 1100, 1150, 1200, 1250, 1300, 1350, 1400, 1450, 1500, 1550, 1600, 1650, 1700, 1750, 1800, 1850, 1900, 1950, 2000, 2050, 2100, 2150, 2200, 2250, 2300, 2350, 2400 consecutive nucleotides in length, the consecutive nucleotides being of any one of the nucleic acid sequences given in Table A1 of the Examples section, or of a nucleic acid encoding an orthologue or paralogue of any one of the amino acid sequences given in Table A1 of the Examples section. Most preferably the portion is a portion of the nucleic acid of SEQ ID NO: 1.

[0247] Preferably, the portion encodes a fragment of an amino acid sequence which, when used in the construction of a phylogenetic tree, such as the one depicted in FIG. 3, clusters with the group of VIM1-like polypeptides comprising the amino acid sequence represented by SEQ ID NO: 2 rather than with any other group and/or comprises at least one of the motifs 1 to 3 and/or has E3 ligase activity.

[0248] In an alternative preferred embodiment, the VIM1-like nucleic acid has, in increasing order of preference at least 30%, 31%, 32%, 33%, 34%, 35%, 36%, 37%, 38%, 39%, 40%, 41%, 42%, 43%, 44%, 45%, 46%, 47%, 48%, 49%, 50%, 51%, 52%, 53%, 54%, 55%, 56%, 57%, 58%, 59%, 60%, 61%, 62%, 63%, 64%, 65%, 66%, 67%, 68%, 69%, 70%, 71%, 72%, 73%, 74%, 75%, 76%, 77%, 78%, 79%, 80%, 81%, 82%, 83%, 84%, 85%, 86%, 87%, 88%, 89%, 90%, 91%, 92%, 93%, 94%, 95%, 96%, 97%, 98%, or 99% sequence identity with any of the nucleic acid sequences of Table A1 and further preferably conferring enhanced yield-related traits relative to control plants.

[0249] Concerning VTC2-like polypeptides, portions useful in the methods of the invention, encode a VTC2-like polypeptide as defined herein, and have substantially the same biological activity as the amino acid sequences given in Table A2 of the Examples section. Preferably, the portion is a portion of any one of the nucleic acids given in Table A2 of the Examples section, or is a portion of a nucleic acid encoding an orthologue or paralogue of any one of the amino acid sequences given in Table A2 of the Examples section. Preferably the portion is at least 500, 550, 600, 650, 700, 750, 800, 850, 900, 950, 1000, 1050, 1100, 1150, 1200, 1250, 1300, 1350, 1400, 1450, 1500, 1550, 1600, 1650, 1700 consecutive nucleotides in length, the consecutive nucleotides being of any one of the nucleic acid sequences given in Table A2 of the Examples section, or of a nucleic acid encoding an orthologue or paralogue of any one of the amino acid sequences given in Table A2 of the Examples section. Most preferably the portion is a portion of the nucleic acid of SEQ ID NO: 60. Preferably, the portion encodes a fragment of an amino acid sequence which, when used in the construction of a phylogenetic tree, such as the one depicted in FIG. 8, clusters with the group of monocot or dicot VTC2-like polypeptides comprising the amino acid sequence represented by SEQ ID NO: 61 or SEQ ID NO: 63, rather than with any other group; and/or comprises any one or more of motifs 4 to 15 and/or has GDP-L-galactose phosphorylase activity.

[0250] Concerning DUF1685 polypeptides, portions useful in the methods of the invention, encode a DUF1685 polypeptide as defined herein, and have substantially the same biological activity as the amino acid sequences given in Table A3 of the Examples section. Preferably, the portion is a portion of any one of the nucleic acids given in Table A3 of the Examples section, or is a portion of a nucleic acid encoding an orthologue or paralogue of any one of the amino acid sequences given in Table A3 of the Examples section. Preferably the portion is at least 300, 350, 400, 450, 500, 550, 600, 650, 700, 750, 800 consecutive nucleotides in length, the consecutive nucleotides being of any one of the nucleic acid sequences given in Table A3 of the Examples section, or of a nucleic acid encoding an orthologue or paralogue of any one of the amino acid sequences given in Table A3 of the Examples section. Most preferably the portion is a portion of the nucleic acid of SEQ ID NO: 187.

[0251] In another preferred embodiment, the portion encodes a polypeptide with an amino acid sequence which has one or more of the following characteristics:
[0252] it clusters with a group of DUF1685 polypeptides comprising amino acid sequence represented by SEQ ID NO: 188 rather than with any other group;
[0253] comprises motifs 16 and/or 17 as indicated above;
[0254] comprises a domain having at least 50%, preferably at least 70%, 75%, 80%, 85%, 90%, 95% sequence identity to the DUF1685 domain as represented by SEQ ID NO: 256.

[0255] Concerning ARF6-like polypeptides, portions useful in the methods of the invention, encode a ARF6-like polypeptide as defined herein, and have substantially the same biological activity as the amino acid sequences given in Table A4 of the Examples section. Preferably, the portion is a portion of any one of the nucleic acids given in Table A4 of the Examples section, or is a portion of a nucleic acid encoding an orthologue or paralogue of any one of the amino acid sequences given in Table A4 of the Examples section. Preferably the portion is at least 500, 550, 600, 650, 700, 750, 800, 850, 900, 950, 1000, 1100, 1500, 1750, 2000, 2100, 2500, 2750, 2900 consecutive nucleotides in length, the consecutive nucleotides being of any one of the nucleic acid sequences given in Table A4 of the Examples section, or of a nucleic acid encoding an orthologue or paralogue of any one of the amino acid sequences given in Table A4 of the Examples section. Most preferably the portion is a portion of the nucleic acid of SEQ ID NO: 260.

[0256] Another nucleic acid variant useful in the methods of the invention is a nucleic acid capable of hybridising, under reduced stringency conditions, preferably under stringent conditions, with a nucleic acid encoding a VIM1 polypeptide, or a VTC2-like polypeptide, or a DUF1685 polypeptide, or an ARF6-like polypeptide, as defined herein, or with a portion as defined herein.

[0257] According to the present invention, there is provided a method for enhancing yield-related traits in plants, comprising introducing and expressing in a plant a nucleic acid capable of hybridizing to any one of the nucleic acids given in Table A1 to A4 of the Examples section, or comprising introducing and expressing in a plant a nucleic acid capable of hybridising to a nucleic acid encoding an orthologue, paralogue or homologue of any of the nucleic acid sequences given in Table A1 to A4 of the Examples section.

[0258] Hybridising sequences useful in the methods of the invention encode a VIM1 polypeptide, or a VTC2-like polypeptide, or a DUF1685 polypeptide, or an ARF6-like polypeptide, as defined herein, having substantially the same biological activity as the amino acid sequences given in Table A1 to A4 of the Examples section. Preferably, the hybridising sequence is capable of hybridising to the complement of any one of the nucleic acids given in Table A1 to A4 of the Examples section, or to a portion of any of these sequences, a portion being as defined above, or the hybridising sequence is capable of hybridising to the complement of a nucleic acid encoding an orthologue or paralogue of any one of the amino acid sequences given in Table A1 to A4 of the Examples section. Most preferably, the hybridising sequence is capable of hybridising to the complement of a nucleic acid as represented by SEQ ID NO: 1 or to a portion thereof, or a nucleic acid as represented by SEQ ID NO: 60 or to a portion thereof, or a nucleic acid as represented by SEQ ID NO: 187 or to a portion thereof, or a nucleic acid as represented by SEQ ID NO: 260 or to a portion thereof.

[0259] Concerning VIM1-like polypeptides, the hybridising sequence referably encodes a polypeptide with an amino acid sequence which, when full-length and used in the construction of a phylogenetic tree, such as the one depicted in FIG. 3, clusters with the group of VIM1-like polypeptides (e.g. as described in Kraft et al., The Plant Journal (2008) 56; 704-715) comprising the amino acid sequence represented by SEQ ID NO: 2 rather than with any other group and/or comprises at least one of the motifs 1 to 3 and/or has E3 ligase activity.

[0260] Concerning VTC2-like polypeptides, the hybridising sequence preferably encodes a polypeptide with an amino acid sequence which, when full-length and used in the construction of a phylogenetic tree, such as the one depicted in FIG. 8, clusters with the group of monocot or dicot VTC2-like polypeptides comprising the amino acid sequence represented by SEQ ID NO: 61 or SEQ ID NO: 63, rather than with any other group; and/or comprises any one or more of motifs 4 to 15 and/or has GDP-L-galactose phosphorylase activity.

[0261] Concerning DUF1685 polypeptides, the hybridising sequence preferably encodes a polypeptide with an amino acid sequence which has one or more of the following characteristics:
[0262] it clusters with a group of DUF1685 polypeptides comprising amino acid sequence represented by SEQ ID NO: 188 rather than with any other group;
[0263] comprises motifs 16 and/or 17 as indicated above;
[0264] comprises a domain having at least 50%, preferably at least 70%, 75%, 80%, 85%, 90%, 95% sequence identity to the DUF1685 domain as represented by SEQ ID NO: 256.

[0265] Another nucleic acid variant useful in the methods of the invention is a splice variant encoding a VIM1 polypeptide, or a VTC2-like polypeptide, or a DUF1685 polypeptide, or an ARF6-like polypeptide, as defined hereinabove, a splice variant being as defined herein.

[0266] According to the present invention, there is provided a method for enhancing yield-related traits in plants, comprising introducing and expressing in a plant a splice variant of any one of the nucleic acid sequences given in Table A1 to A4 of the Examples section, or a splice variant of a nucleic acid encoding an orthologue, paralogue or homologue of any of the amino acid sequences given in Table A1 to A4 of the Examples section.

[0267] Concerning VIM1-like polypeptides, preferred splice variants are splice variants of a nucleic acid represented by SEQ ID NO: 1, or a splice variant of a nucleic acid encoding an orthologue or paralogue of SEQ ID NO: 2. Preferably, the amino acid sequence encoded by the splice variant, when used in the construction of a phylogenetic tree, such as the one depicted in FIG. 3, clusters with the group of VIM1-like polypeptides (e.g. as described in Kraft et al., The Plant Journal (2008) 56; 704-715) comprising the amino acid sequence represented by SEQ ID NO: 2 rather than with any other group and/or comprises at least one of the motifs 1 to 3 and/or has E3 ligase activity.

[0268] Concerning VTC2-like polypeptides, preferred splice variants are splice variants of a nucleic acid represented by SEQ ID NO: 60, or a splice variant of a nucleic acid encoding an orthologue or paralogue of SEQ ID NO: 61. Preferably, the amino acid sequence encoded by the splice variant which, when used in the construction of a phylogenetic tree, such as the one depicted in FIG. 8, clusters with the group of monocot or dicot VTC2-like polypeptides comprising the amino acid sequence represented by SEQ ID NO: 61 or SEQ ID NO: 63, rather than with any other group; and/or comprises any one or more of motifs 4 to 15 and/or has GDP-L-galactose phosphorylase activity.

[0269] Concerning DUF1685 polypeptides, preferred splice variants are splice variants of a nucleic acid represented by SEQ ID NO: 187, or a splice variant of a nucleic acid encoding an orthologue or paralogue of SEQ ID NO: 188. Preferably, the amino acid sequence encoded by the splice variant has one or more of the following characteristics:
[0270] it clusters with a group of DUF1685 polypeptides comprising amino acid sequence represented by SEQ ID NO: 188 rather than with any other group;
[0271] comprises motifs 16 and/or 17 as indicated above;
[0272] comprises a domain having at least 50%, preferably at least 70%, 75%, 80%, 85%, 90%, 95% sequence identity to the DUF1685 domain as represented by SEQ ID NO: 256.

[0273] Concerning ARF6-like polypeptides, preferred splice variants are splice variants of a nucleic acid represented by SEQ ID NO: 260, or a splice variant of a nucleic acid encoding an orthologue or paralogue of SEQ ID NO: 261.

[0274] Another nucleic acid variant useful in performing the methods of the invention is an allelic variant of a nucleic acid encoding a VIM1 polypeptide, or a VTC2-like polypeptide, or a DUF1685 polypeptide, or an ARF6-like polypeptide, as defined hereinabove, an allelic variant being as defined herein.

[0275] According to the present invention, there is provided a method for enhancing yield-related traits in plants, comprising introducing and expressing in a plant an allelic variant of any one of the nucleic acids given in Table A1 to A4 of the Examples section, or comprising introducing and expressing in a plant an allelic variant of a nucleic acid encoding an orthologue, paralogue or homologue of any of the amino acid sequences given in Table A1 to A4 of the Examples section.

[0276] Concerning VIM1-like polypeptides, the polypeptides encoded by allelic variants useful in the methods of the present invention have substantially the same biological activity as the VIM1-like polypeptide of SEQ ID NO: 2 and any of the amino acids depicted in Table A1 of the Examples section. Allelic variants exist in nature, and encompassed within the methods of the present invention is the use of these natural alleles. Preferably, the allelic variant is an allelic variant of SEQ ID NO: 1 or an allelic variant of a nucleic acid encoding an orthologue or paralogue of SEQ ID NO: 2. Preferably, the amino acid sequence encoded by the allelic variant, when used in the construction of a phylogenetic tree, such as the one depicted in FIG. 3, clusters with the group of VIM1-like polypeptides (e.g. as described in Kraft et al., The Plant Journal (2008) 56; 704-715) comprising the amino acid sequence represented by SEQ ID NO: 2 rather than with any other group and/or comprises at least one of the motifs 1 to 3 and/or has E3 ligase activity.

[0277] Concerning VTC2-like polypeptides, the polypeptides encoded by allelic variants useful in the methods of the present invention have substantially the same biological activity as the VTC2-like polypeptide of SEQ ID NO: 61 and any of the amino acids depicted in Table A2 of the Examples section. Allelic variants exist in nature, and encompassed within the methods of the present invention is the use of these natural alleles. Preferably, the allelic variant is an allelic variant of SEQ ID NO: 60 or an allelic variant of a nucleic acid encoding an orthologue or paralogue of SEQ ID NO: 61. Preferably, the amino acid sequence encoded by the allelic variant which, when used in the construction of a phylogenetic tree, such as the one depicted in FIG. 8, clusters with the group of monocot or dicot VTC2-like polypeptides comprising the amino acid sequence represented by SEQ ID NO: 61 or SEQ ID NO: 63, rather than with any other group; and/or comprises any one or more of motifs 4 to 15 and/or has GDP-L-galactose phosphorylase activity.

[0278] Concerning DUF1685 polypeptides, the polypeptides encoded by allelic variants useful in the methods of the present invention have substantially the same biological activity as the DUF1685 polypeptide of SEQ ID NO: 188 and any of the amino acids depicted in Table A3 of the Examples section. Allelic variants exist in nature, and encompassed within the methods of the present invention is the use of these natural alleles. Preferably, the allelic variant is an allelic variant of SEQ ID NO: 187 or an allelic variant of a nucleic acid encoding an orthologue or paralogue of SEQ ID NO: 188. Preferably, the amino acid sequence encoded by the allelic variant has one or more of the following characteristics:
[0279] it clusters with a group of DUF1685 polypeptides comprising amino acid sequence represented by SEQ ID NO: 188 rather than with any other group;
[0280] comprises motifs 16 and/or 17 as indicated above;
[0281] comprises a domain having at least 50%, preferably at least 70%, 75%, 80%, 85%, 90%, 95% sequence identity to the DUF1685 domain as represented by SEQ ID NO: 256.

[0282] Concerning ARF6-like polypeptides, the polypeptides encoded by allelic variants useful in the methods of the present invention have substantially the same biological activity as the ARF6-like polypeptide of SEQ ID NO: 261 and any of the amino acids depicted in Table A4 of the Examples section. Allelic variants exist in nature, and encompassed within the methods of the present invention is the use of these natural alleles. Preferably, the allelic variant is an allelic variant of SEQ ID NO: 260 or an allelic variant of a nucleic acid encoding an orthologue or paralogue of SEQ ID NO: 261.

[0283] Gene shuffling or directed evolution may also be used to generate variants of nucleic acids encoding VIM1 polypeptides, or VTC2-like polypeptides, or DUF1685 polypeptides, or ARF6-like polypeptides, as defined above; the term “gene shuffling” being as defined herein.

[0284] According to the present invention, there is provided a method for enhancing yield-related traits in plants, comprising introducing and expressing in a plant a variant of any one of the nucleic acid sequences given in Table A1 to A4 of the Examples section, or comprising introducing and expressing in a plant a variant of a nucleic acid encoding an orthologue, paralogue or homologue of any of the amino acid sequences given in Table A1 to A4 of the Examples section, which variant nucleic acid is obtained by gene shuffling.

[0285] Concerning VIM1-like polypeptides, the amino acid sequence encoded by the variant nucleic acid obtained by gene shuffling, when used in the construction of a phylogenetic tree such as the one depicted in FIG. 3, preferably clusters with the group of VIM1-like polypeptides (e.g. as described in Kraft et al., The Plant Journal (2008) 56; 704-715) comprising the amino acid sequence represented by SEQ ID NO: 2 rather than with any other group and/or comprises at least one of the motifs 1 to 3 and/or has E3 ligase activity.

[0286] Concerning VTC2-like polypeptides, the amino acid sequence encoded by the variant nucleic acid obtained by gene shuffling which, when used in the construction of a phylogenetic tree, such as the one depicted in FIG. 8, preferably clusters with the group of monocot or dicot VTC2-like polypeptides comprising the amino acid sequence represented by SEQ ID NO: 61 or SEQ ID NO: 63, rather than with any other group; and/or comprises any one or more of motifs 4 to 15 and/or has GDP-L-galactose phosphorylase activity.

[0287] Concerning DUF1685 polypeptides, the amino acid sequence encoded by the variant nucleic acid obtained by gene shuffling preferably has one or more of the following characteristics:
[0288] it clusters with a group of DUF1685 polypeptides comprising amino acid sequence represented by SEQ ID NO: 188 rather than with any other group;
[0289] comprises motifs 16 and/or 17 as indicated above;
[0290] comprises a domain having at least 50%, preferably at least 70%, 75%, 80%, 85%, 90%, 95% sequence identity to the DUF1685 domain as represented by SEQ ID NO: 256.

[0291] Furthermore, nucleic acid variants may also be obtained by site-directed mutagenesis. Several methods are available to achieve site-directed mutagenesis, the most common being PCR based methods (Current Protocols in Molecular Biology. Wiley Eds.).

[0292] Concerning VIM1-like polypeptides, nucleic acids encoding VIM1-like polypeptides may be derived from any natural or artificial source. The nucleic acid may be modified from its native form in composition and/or genomic environment through deliberate human manipulation. Preferably the VIM1-like polypeptide-encoding nucleic acid is from a plant, further preferably from a dicotyledonous plant, more preferably from the Salicaceae, more preferably from the genus Populus, most preferably from Populus trichocarpa.

[0293] Concerning VTC2-like polypeptides, nucleic acids encoding VTC2-like polypeptides may be derived from any natural or artificial source. The nucleic acid may be modified from its native form in composition and/or genomic environment through deliberate human manipulation. Preferably the VTC2-like polypeptide-encoding nucleic acid is from a plant, further preferably from a monocotyledonous plant, more preferably from the family Poaceae, most preferably the nucleic acid is from Triticum aestivum. In another embodiment, the VTC2-like polypeptide-encoding nucleic acid is from a dicotyledonous plant, more preferably from the family Brassicaceae, most preferably the nucleic acid is from Arabidopsis thaliana.

[0294] Concerning DUF1685 polypeptides, nucleic acids encoding DUF1685 polypeptides may be derived from any natural or artificial source. The nucleic acid may be modified from its native form in composition and/or genomic environment through deliberate human manipulation. Preferably the DUF1685 polypeptide-encoding nucleic acid is from a plant, in particular from a plant which belong to the superfamily Viridiplantae, in particular monocotyledonous and dicotyledonous plants. In an embodiment, nucleic acids encoding DUF1685 polypeptides are derived from a dicotyledonous plant, more preferably from the family Salicaceae, most preferably from the genes Populus. In an example, the nucleic acid is from Populus trichocarpa. In another embodiment nucleic acids encoding DUF1685 polypeptides are derived from a monocotyledonous plant.

[0295] Concerning ARF6-like polypeptides, nucleic acids encoding ARF6-like polypeptides may be derived from any natural or artificial source. The nucleic acid may be modified from its native form in composition and/or genomic environment through deliberate human manipulation. Preferably the ARF6-like polypeptide-encoding nucleic acid is from a plant, further preferably from a monocotyledonous plant, more preferably from the family Poaceae, most preferably the nucleic acid is from Oryza sativa.

[0296] Performance of the methods of the invention gives plants having enhanced yield-related traits. In particular performance of the methods of the invention gives plants having increased yield, especially increased seed yield relative to control plants. The terms “yield” and “seed yield” are described in more detail in the “definitions” section herein.

[0297] Reference herein to enhanced yield-related traits is taken to mean an increased early vigour and/or in biomass (weight) of one or more parts of a plant, which may include (i) aboveground parts and preferably aboveground harvestable parts and/or (ii) parts below ground and preferably harvestable below ground. In particular, such harvestable parts are seeds, and performance of the methods of the invention results in plants having increased seed yield relative to the seed yield of control plants.

[0298] Concerning VIM1-like polypeptides, the present invention provides a method for increasing yield-related traits, in particular yield, especially plant height and seed yield of plants, relative to control plants, which method comprises modulating expression in a plant of a nucleic acid encoding a VIM1-like polypeptide as defined herein.

[0299] Concerning VTC2-like polypeptides, the present invention provides a method for increasing yield-related traits, in particular yield, especially seed yield of plants, relative to control plants, which method comprises modulating expression in a plant of a nucleic acid encoding a VTC2-like polypeptide as defined herein.

[0300] Concerning DUF1685 polypeptides, the present invention provides a method for increasing yield-related traits, especially for increasing seed yield of plants, relative to control plants, which method comprises modulating expression in a plant of a nucleic acid encoding a DUF1685 polypeptide as defined herein.

[0301] Concerning ARF6-like polypeptides, the present invention provides a method for increasing yield-related traits, especially growth, growth rate, biomass, leaf biomass, root biomass, tillering and yield of plants, relative to control plants, which method comprises modulating expression in a plant of a nucleic acid encoding a ARF6-like polypeptide as defined herein.

[0302] According to a preferred feature of the present invention, performance of the methods of the invention gives plants having an increased growth rate relative to control plants. Therefore, according to the present invention, there is provided a method for increasing the growth rate of plants, which method comprises modulating expression in a plant of a nucleic acid encoding a VIM1 polypeptide, or a VTC2-like polypeptide, or a DUF1685 polypeptide, or an ARF6-like polypeptide, as defined herein.

[0303] Performance of the methods of the invention gives plants grown under non-stress conditions or under mild drought conditions increased yield relative to control plants grown under comparable conditions. Therefore, according to the present invention, there is provided a method for increasing yield in plants grown under non-stress conditions or under mild drought conditions, which method comprises modulating expression in a plant of a nucleic acid encoding a VIM1 polypeptide, or a VTC2-like polypeptide, or a DUF1685 polypeptide, or an ARF6-like polypeptide.

[0304] Performance of the methods of the invention may give plants that are grown under drought conditions increased yield-related traits as provided herein relative to control plants grown under comparable conditions. Therefore, according to the present invention, there is provided a method for increasing yield-related traits in plants grown under stress conditions, and in particular under drought conditions, which method comprises modulating expression in a plant of a nucleic acid encoding a DUF1685 polypeptide as defined herein.

[0305] Performance of the methods of the invention gives plants grown under conditions of nutrient deficiency, particularly under conditions of nitrogen deficiency, increased yield relative to control plants grown under comparable conditions. Therefore, according to the present invention, there is provided a method for increasing yield in plants grown under conditions of nutrient deficiency, which method comprises modulating expression in a plant of a nucleic acid encoding a VIM1 polypeptide, or a VTC2-like polypeptide, or a DUF1685 polypeptide, or an ARF6-like polypeptide.

[0306] Performance of the methods of the invention gives plants grown under conditions of salt stress, increased yield relative to control plants grown under comparable conditions. Therefore, according to the present invention, there is provided a method for increasing yield in plants grown under conditions of salt stress, which method comprises modulating expression in a plant of a nucleic acid encoding a VIM1 polypeptide, or a VTC2-like polypeptide, or a DUF1685 polypeptide, or an ARF6-like polypeptide.

[0307] The invention also provides genetic constructs and vectors to facilitate introduction and/or expression in plants of nucleic acids encoding VIM1 polypeptides, or VTC2-like polypeptides, or DUF1685 polypeptides, or ARF6-like polypeptides. The gene constructs may be inserted into vectors, which may be commercially available, suitable for transforming into plants and suitable for expression of the gene of interest in the transformed cells. The invention also provides use of a gene construct as defined herein in the methods of the invention.

[0308] More specifically, the present invention provides a construct comprising:
[0309] (a) a nucleic acid encoding a VIM1 polypeptide, or a VTC2-like polypeptide, or a DUF1685 polypeptide, or an ARF6-like polypeptide, as defined above;
[0310] (b) one or more control sequences capable of driving expression of the nucleic acid sequence of (a); and optionally
[0311] (c) a transcription termination sequence.

[0312] Preferably, the nucleic acid encoding a VIM1 polypeptide, or a VTC2-like polypeptide, or a DUF1685 polypeptide, or an ARF6-like polypeptide, is as defined above. The term “control sequence” and “termination sequence” are as defined herein.

[0313] The invention furthermore provides plants transformed with a construct as described above. In particular, the invention provides plants transformed with a construct as described above, which plants have increased yield-related traits as described herein.

[0314] Plants are transformed with a vector comprising any of the nucleic acids described above. The skilled artisan is well aware of the genetic elements that must be present on the vector in order to successfully transform, select and propagate host cells containing the sequence of interest. The sequence of interest is operably linked to one or more control sequences (at least to a promoter).

[0315] Advantageously, any type of promoter, whether natural or synthetic, may be used to drive expression of the nucleic acid sequence, but preferably the promoter is of plant origin. A constitutive promoter is particularly useful in the methods. Preferably the constitutive promoter is a ubiquitous constitutive promoter of medium strength. See the “Definitions” section herein for definitions of the various promoter types.

[0316] Concerning VIM1-like polypeptides, it should be clear that the applicability of the present invention is not restricted to the VIM1-like polypeptide-encoding nucleic acid represented by SEQ ID NO: 1, nor is the applicability of the invention restricted to expression of a VIM1-like polypeptide-encoding nucleic acid when driven by a constitutive promoter.

[0317] The constitutive promoter is preferably a medium strength promoter. More preferably it is a plant derived promoter, such as a GOS2 promoter or a promoter of substantially the same strength and having substantially the same expression pattern (a functionally equivalent promoter), more preferably the promoter is the promoter GOS2 promoter from rice. Further preferably the constitutive promoter is represented by a nucleic acid sequence substantially similar to SEQ ID NO: 57, most preferably the constitutive promoter is as represented by SEQ ID NO: 57. See the “Definitions” section herein for further examples of constitutive promoters.

[0318] Optionally, one or more terminator sequences may be used in the construct introduced into a plant. Preferably, the construct comprises an expression cassette comprising a GOS2 promoter, substantially similar to SEQ ID NO: 57, and the nucleic acid encoding the VIM1-like polypeptide. More preferably, the expression cassette comprises the sequence represented by SEQ ID NO: 56 (pGOS2::VIM1-like::t-zein sequence). Furthermore, one or more sequences encoding selectable markers may be present on the construct introduced into a plant.

[0319] Concerning VTC2-like polypeptides, it should be clear that the applicability of the present invention is not restricted to the VTC2-like polypeptide-encoding nucleic acid represented by SEQ ID NO: 60 or SEQ ID NO: 62, nor is the applicability of the invention restricted to expression of a VTC2-like polypeptide-encoding nucleic acid when driven by a constitutive promoter, or when driven by a root-specific promoter.

[0320] The constitutive promoter is preferably a medium strength promoter. More preferably it is a plant derived promoter, such as a GOS2 promoter or a promoter of substantially the same strength and having substantially the same expression pattern (a functionally equivalent promoter), more preferably the promoter is the promoter GOS2 promoter from rice. Further preferably the constitutive promoter is represented by a nucleic acid sequence substantially similar to SEQ ID NO: 180, most preferably the constitutive promoter is as represented by SEQ ID NO: 180. See the “Definitions” section herein for further examples of constitutive promoters.

[0321] Optionally, one or more terminator sequences may be used in the construct introduced into a plant. Preferably, the construct comprises an expression cassette comprising a rice GOS2 promoter, substantially similar to SEQ ID NO: 180, and the nucleic acid encoding the VTC2-like polypeptide. More preferably, the expression cassette comprises the sequence represented by SEQ ID NO: 181 (pGOS2::AtVTC2::t-zein cassette comprising SEQ ID NO: 60) or by SEQ ID NO: 182 (pGOS2::TaVTC2::t-zein cassette comprising SEQ ID NO: 62). Furthermore, one or more sequences encoding selectable markers may be present on the construct introduced into a plant.

[0322] Concerning DUF1685 polypeptides, it should be clear that the applicability of the present invention is not restricted to the DUF1685 polypeptide-encoding nucleic acid represented by SEQ ID NO: 187, nor is the applicability of the invention restricted to expression of a DUF1685 polypeptide-encoding nucleic acid when driven by a constitutive promoter.

[0323] The constitutive promoter is preferably a medium strength promoter. In another preferred embodiment, a said control sequence is a plant promoter. In another embodiment, said control sequence is a promoter from a monocotyledonous plant or from a dicotyledonous plant. More preferably it is a plant derived GOS2 promoter or a promoter of substantially the same strength and having substantially the same expression pattern (a functionally equivalent promoter). Preferably the promoter is the GOS2 promoter from rice. Further preferably the constitutive promoter is represented by a nucleic acid sequence substantially similar to SEQ ID NO: 255, most preferably the constitutive promoter is as represented by SEQ ID NO: 255. See the “Definitions” section herein for further examples of constitutive promoters.

[0324] Optionally, one or more terminator sequences may be used in the construct introduced into a plant. In a preferred embodiment, a construct is provided which comprises an expression cassette comprising a GOS2 promoter, substantially similar to SEQ ID NO: 255, a nucleic acid encoding a DUF1685 polypeptide, and a terminator sequence. In a preferred embodiment, said terminator sequence comprises a nucleic acid sequence corresponding to a t-rbcs (small subunit of rubisco enzyme) terminator fused to a nucleic acid sequence corresponding to a t-zein terminator. Preferably, the expression cassette comprises the sequence represented by SEQ ID NO: 257 (pGOS2::DUF::t-rbcs-t-zein terminator sequence). Furthermore, one or more sequences encoding selectable markers may be present on the construct introduced into a plant.

[0325] Concerning ARF6-like polypeptides, it should be clear that the applicability of the present invention is not restricted to the ARF6-like polypeptide-encoding nucleic acid represented by SEQ ID NO: 260, nor is the applicability of the invention restricted to expression of a ARF6-like polypeptide-encoding nucleic acid when driven by a constitutive promoter.

[0326] The constitutive promoter is preferably a medium strength promoter. More preferably it is a plant derived promoter, such as a GOS2 promoter or a promoter of substantially the same strength and having substantially the same expression pattern (a functionally equivalent promoter), more preferably the promoter is the promoter GOS2 promoter from rice. Further preferably the constitutive promoter is represented by a nucleic acid sequence substantially similar to SEQ ID NO: 310, most preferably the constitutive promoter is as represented by SEQ ID NO: 310. See the “Definitions” section herein for further examples of constitutive promoters.

[0327] Optionally, one or more terminator sequences may be used in the construct introduced into a plant. Preferably, the construct comprises an expression cassette comprising a GOS2 promoter promoter, substantially similar to SEQ ID NO: 310, operably linked to the nucleic acid encoding the ARF6-like polypeptide. Furthermore, one or more sequences encoding selectable markers may be present on the construct introduced into a plant.

[0328] According to a preferred feature of the invention, the modulated expression is increased expression. Methods for increasing expression of nucleic acids or genes, or gene products, are well documented in the art and examples are provided in the definitions section.

[0329] As mentioned above, a preferred method for modulating expression of a nucleic acid encoding a VIM1 polypeptide, or a VTC2-like polypeptide, or a DUF1685 polypeptide, or an ARF6-like polypeptide, is by introducing and expressing in a plant a nucleic acid encoding a VIM1 polypeptide, or a VTC2-like polypeptide, or a DUF1685 polypeptide, or an ARF6-like polypeptide; however the effects of performing the method, i.e. enhancing yield-related traits may also be achieved using other well known techniques, including but not limited to T-DNA activation tagging, TILLING, homologous recombination. A description of these techniques is provided in the definitions section.

[0330] The invention also provides a method for the production of transgenic plants having enhanced yield-related traits relative to control plants, comprising introduction and expression in a plant of any nucleic acid encoding a VIM1 polypeptide, or a VTC2-like polypeptide, or a DUF1685 polypeptide, or an ARF6-like polypeptide, as defined hereinabove.

[0331] More specifically, the present invention provides a method for the production of transgenic plants having enhanced yield-related traits, particularly increased yield and increased seed yield, which method comprises:
[0332] (i) introducing and expressing in a plant or plant cell a nucleic acid encoding a VIM1 polypeptide, or a VTC2-like polypeptide, or a DUF1685 polypeptide, or an ARF6-like polypeptide, or a genetic construct comprising nucleic acid encoding a VIM1 polypeptide, or a VTC2-like polypeptide, or a DUF1685 polypeptide, or an ARF6-like polypeptide; and
[0333] (ii) cultivating the plant cell under conditions promoting plant growth and development.

[0334] Cultivating the plant cell under conditions promoting plant growth and development, may or may not include regeneration and or growth to maturity.

[0335] The nucleic acid of (i) may be any of the nucleic acids capable of encoding a VIM1 polypeptide, or a VTC2-like polypeptide, or a DUF1685 polypeptide, or an ARF6-like polypeptide, as defined herein.

[0336] The nucleic acid may be introduced directly into a plant cell or into the plant itself (including introduction into a tissue, organ or any other part of a plant). According to a preferred feature of the present invention, the nucleic acid is preferably introduced into a plant by transformation. The term “transformation” is described in more detail in the “definitions” section herein.

[0337] The present invention clearly extends to any plant cell or plant produced by any of the methods described herein, and to all plant parts and propagules thereof. The present invention encompasses plants or parts thereof (including seeds) obtainable by the methods according to the present invention. The plants or parts thereof comprise a nucleic acid transgene encoding a VIM1 polypeptide, or a VTC2-like polypeptide, or a DUF1685 polypeptide, or an ARF6-like polypeptide, as defined above. The present invention extends further to encompass the progeny of a primary transformed or transfected cell, tissue, organ or whole plant that has been produced by any of the aforementioned methods, the only requirement being that progeny exhibit the same genotypic and/or phenotypic characteristic(s) as those produced by the parent in the methods according to the invention.

[0338] The invention also includes host cells containing an isolated nucleic acid encoding a VIM1 polypeptide, or a VTC2-like polypeptide, or a DUF1685 polypeptide, or an ARF6-like polypeptide, as defined hereinabove. Preferred host cells according to the invention are plant cells. Host plants for the nucleic acids or the vector used in the method according to the invention, the expression cassette or construct or vector are, in principle, advantageously all plants, which are capable of synthesizing the polypeptides used in the inventive method.

[0339] In yet another particular embodiment the plant cells of the invention are non-propagative or non-regenerable cells, i.e. cells that are not capable to regenerate into a plant using cell culture techniques known in the art; e.g. the cells can not be used to regenerate a whole plant from this cell as a whole using standard cell culture techniques, this meaning cell culture methods but excluding in-vitro nuclear, organelle or chromosome transfer methods. While plants cells generally have the characteristic of totipotency, some plant cells can not be used to regenerate or propagate intact plants from said cells. In one embodiment of the invention the plant cells of the invention are such cells. In another embodiment the plant cells of the invention are plant cells that do not sustain themselves through photosynthesis by synthesizing carbohydrate and protein from inorganic substances as water, carbon dioxide and mineral salt, i.e. in an autotrophic way, such plant cells are not deemed to represent a non-plant variety.

[0340] The methods of the invention are advantageously applicable to any plant, in particular to any plant as defined herein. Plants that are particularly useful in the methods of the invention include all plants which belong to the superfamily Viridiplantae, in particular monocotyledonous and dicotyledonous plants including fodder or forage legumes, ornamental plants, food crops, trees or shrubs.

[0341] According to an embodiment of the present invention, the plant is a crop plant. Examples of crop plants include but are not limited to chicory, carrot, cassava, trefoil, soybean, beet, sugar beet, sunflower, canola, alfalfa, rapeseed, linseed, cotton, tomato, potato and tobacco.

[0342] According to another embodiment of the present invention, the plant is a monocotyledonous plant. Examples of monocotyledonous plants include sugarcane.

[0343] According to another embodiment of the present invention, the plant is a cereal. Examples of cereals include rice, maize, wheat, barley, millet, rye, triticale, sorghum, emmer, spelt, secale, einkorn, teff, milo and oats.

[0344] The invention also extends to harvestable parts of a plant such as, but not limited to seeds, leaves, fruits, flowers, stems, roots, rhizomes, tubers and bulbs, which harvestable parts comprise a recombinant nucleic acid encoding a VIM1 polypeptide, or a VTC2-like polypeptide, or a DUF1685 polypeptide, or an ARF6-like polypeptide. The invention furthermore relates to products derived, preferably directly derived, from a harvestable part of such a plant, such as dry pellets or powders, oil, fat and fatty acids, starch or proteins.

[0345] The present invention also encompasses use of nucleic acids encoding VIM1-like polypeptides as described herein and use of these VIM1 polypeptides, or VTC2-like polypeptides, or DUF1685 polypeptides, or ARF6-like polypeptides, in enhancing any of the aforementioned yield-related traits in plants. For example, nucleic acids encoding a VIM1 polypeptide, or a VTC2-like polypeptide, or a DUF1685 polypeptide, or an ARF6-like polypeptide, described herein, or the VIM1 polypeptides, or VTC2-like polypeptides, or DUF1685 polypeptides, or ARF6-like polypeptides, themselves, may find use in breeding programmes in which a DNA marker is identified which may be genetically linked to a gene encoding a VIM1 polypeptide, or a VTC2-like polypeptide, or a DUF1685 polypeptide, or an ARF6-like polypeptide. The nucleic acids/genes, or the VIM1 polypeptides, or VTC2-like polypeptides, or DUF1685 polypeptides, or ARF6-like polypeptides, themselves may be used to define a molecular marker. This DNA or protein marker may then be used in breeding programmes to select plants having enhanced yield-related traits as defined hereinabove in the methods of the invention. Furthermore, allelic variants of a nucleic acid/gene encoding a VIM1 polypeptide, or a VTC2-like polypeptide, or a DUF1685 polypeptide, or an ARF6-like polypeptide, may find use in marker-assisted breeding programmes. Nucleic acids encoding VIM1 polypeptides, or VTC2-like polypeptides, or DUF1685 polypeptides, or ARF6-like polypeptides, may also be used as probes for genetically and physically mapping the genes that they are a part of, and as markers for traits linked to those genes. Such information may be useful in plant breeding in order to develop lines with desired phenotypes.

### EMBODIMENTS

[0346] The invention is in particular characterised by one or more of the following embodiments:
[0347] 1. comprising modulating expression in a plant of a nucleic acid encoding a VIM1-like polypeptide, wherein said VIM1-like polypeptide comprises an Interpro accession IPR019787, corresponding to PFAM accession number SM00249 plant homeodomain (PHD) domain; an Interpro accession IPR018957, corresponding to PFAM accession number PF00097 really interesting new gene (RING) domain and an Interpro accession IPR003105, corresponding to PFAM accession number PF02182 Set Ring Associated (SRA) domain.
[0348] 2. Method according to embodiment 1, wherein said modulated expression is effected by introducing and expressing in a plant said nucleic acid encoding said VIM1-like polypeptide.
[0349] 3. Method according to embodiment 1 or 2, wherein said enhanced yield-related traits comprise increased yield relative to control plants, and preferably comprise increased plant height and/or increased seed yield relative to control plants.
[0350] 4. Method according to any one of embodiments 1 to 3, wherein said enhanced yield-related traits are obtained under non-stress conditions.
[0351] 5. Method according to any one of embodiments 1 to 3, wherein said enhanced yield-related traits are obtained under conditions of drought stress, salt stress or nitrogen deficiency.
[0352] 6. Method according to any of embodiments 1 to 5, wherein said VIM1-like polypeptide comprises one or more of the following motifs:

(i) Motif 1:
(SEQ ID NO: 53)
RQWGAH[LF]PHVAGIAGQS[TA][YHV]GAQSVALSGGY[IED]DDEDHGE
WFLYTGSGGRDL,
(ii) Motif 2:
(SEQ ID NO: 54)
F[DE][KN][ML]N[EA]ALR[LV]SC[LK]KGYPVRVVRSHKEKRS[AS]YAPE
[TES]GV
(iii) Motif 3:
(SEQ ID NO: 55)
A[YF]TTERAK[KR][AT]GKANA[CSA]SG[KQ]IFVT[VI][AP]PDHFGPI[PL]A
ENDP[ET]RN[MQ]GVLVG[ED][IST]W

[0353] 7. Method according to any one of embodiments 1 to 6, wherein said nucleic acid encoding a VIM1-like polypeptide is of plant origin, preferably from a dicotyledonous plant, further preferably from the family Salicaceae, more preferably from the genus Populus, most preferably from Populus trichocarpa.
[0354] 8. Method according to any one of embodiments 1 to 7, wherein said nucleic acid encoding a VIM1-like polypeptide encodes any one of the polypeptides listed in Table A1 or is a portion of such a nucleic acid, or a nucleic acid capable of hybridising with such a nucleic acid.
[0355] 9. Method according to any one of embodiments 1 to 8, wherein said nucleic acid sequence encodes an orthologue or paralogue of any of the polypeptides given in Table A1.
[0356] 10. Method according to any one of embodiments 1 to 9, wherein said nucleic acid encodes a VIM1-like polypeptide corresponding to SEQ ID NO: 2.
[0357] 11. Method according to any one of embodiments 1 to 10, wherein said nucleic acid is operably linked to a constitutive promoter, preferably to a medium strength constitutive promoter, preferably to a plant promoter, more preferably to a GOS2 promoter, most preferably to a GOS2 promoter from rice.
[0358] 12. Plant, plant part thereof, including seeds, or plant cell, obtainable by a method according to any one of embodiments 1 to 11, wherein said plant, plant part or plant cell comprises a recombinant nucleic acid encoding a VIM1-like polypeptide as defined in any of embodiments 1 and 6 to 10.
[0359] 13. An isolated nucleic acid molecule selected from:
   [0360] (i) a nucleic acid represented by SEQ ID NO: 1;
   [0361] (ii) the complement of a nucleic acid represented by SEQ ID NO: 1;
   [0362] (iii) a nucleic acid encoding a VIM1-like polypeptide having in increasing order of preference at least 50%, 51%, 52%, 53%, 54%, 55%, 56%, 57%, 58%, 59%, 60%, 61%, 62%, 63%, 64%, 65%, 66%, 67%, 68%, 69%, 70%, 71%, 72%, 73%, 74%, 75%, 76%, 77%, 78%, 79%, 80%, 81%, 82%, 83%, 84%, 85%, 86%, 87%, 88%, 89%, 90%, 91%, 92%, 93%, 94%, 95%, 96%, 97%, 98%, or 99% sequence identity to the amino acid sequence represented by SEQ ID NO: 2, and additionally or alternatively comprising one or more motifs having in increasing order of preference at least 50%, 55%, 60%, 65%, 70%, 75%, 80%, 85%, 90%, 95%, 96%, 97%, 98%, 99% or more sequence identity to any one or more of the motifs given in SEQ ID NO: 53 to SEQ ID NO: 55, and further preferably conferring enhanced yield-related traits relative to control plants.
   [0363] (iv) a nucleic acid molecule which hybridizes with a nucleic acid molecule of (i) to (iii) under high stringency hybridization conditions and preferably confers enhanced yield-related traits relative to control plants.
[0364] 14. An isolated polypeptide selected from:
   [0365] (i) an amino acid sequence represented by SEQ ID NO: 2;
   [0366] (ii) an amino acid sequence having, in increasing order of preference, at least 36%, 37%, 38%, 39%, 40%, 41%, 42%, 43%, 44%, 45%, 46%, 47%, 48%, 49%, 50%, 51%, 52%, 53%, 54%, 55%, 56%, 57%, 58%, 59%, 60%, 61%, 62%, 63%, 64%, 65%, 66%, 67%, 68%, 69%, 70%, 71%, 72%, 73%, 74%, 75%, 76%, 77%, 78%, 79%, 80%, 81%, 82%, 83%, 84%, 85%, 86%, 87%, 88%, 89%, 90%, 91%, 92%, 93%, 94%, 95%, 96%, 97%, 98%, or 99% sequence identity to the amino acid sequence represented by SEQ ID NO: 2, and additionally or alternatively comprising one or more motifs having in increasing order of preference at least 50%, 55%, 60%, 65%, 70%, 75%, 80%, 85%, 90%, 95%, 96%, 97%, 98%, 99% or more sequence identity to any one or more of the motifs given in SEQ ID NO: 53 to SEQ ID NO: 55, and further preferably conferring enhanced yield-related traits relative to control plants;
   [0367] (iii) derivatives of any of the amino acid sequences given in (i) or (ii) above.
[0368] 15. Construct comprising:
   [0369] (i) nucleic acid encoding a VIM1-like polypeptide as defined in any of embodiments 1 and 6 to 10 and 13;
   [0370] (ii) one or more control sequences capable of driving expression of the nucleic acid sequence of (i); and optionally
   [0371] (i) a transcription termination sequence.
[0372] 16. Construct according to embodiment 15, wherein one of said control sequences is a constitutive promoter, preferably a medium strength constitutive promoter, preferably a plant promoter, more preferably a GOS2 promoter, most preferably a GOS2 promoter from rice.
[0373] 17. Use of a construct according to embodiment 15 or 16 in a method for making plants having enhanced yield-related traits, preferably increased yield relative to control plants, and more preferably increased seed yield and/or increased plant height relative to control plants.
[0374] 18. Plant, plant part or plant cell transformed with a construct according to embodiment 15 or 16.
[0375] 19. Method for the production of a transgenic plant having enhanced yield-related traits relative to control plants, preferably increased yield relative to control plants, and more preferably increased seed yield and/or increased plant height relative to control plants, comprising:
   [0376] (i) introducing and expressing in a plant cell or plant a nucleic acid encoding a VIM1-like polypeptide as defined in any of embodiments 1 to 12; and
   [0377] (ii) cultivating said plant cell or plant under conditions promoting plant growth and development.
[0378] 20. Transgenic plant having enhanced yield-related traits relative to control plants, preferably increased yield relative to control plants, and more preferably increased seed yield and/or increased plant height, resulting from modulated expression of a nucleic acid encoding a VIM1-like polypeptide as defined in any of embodiments 1 to 12 or a transgenic plant cell derived from said transgenic plant.
[0379] 21. Transgenic plant according to embodiment 12, 18 or 20, or a transgenic plant cell derived therefrom, wherein said plant is a crop plant, such as beet, sugarbeet or alfalfa; or a monocotyledonous plant such as sugarcane; or a cereal, such as rice, maize, wheat, barley, millet, rye, triticale, sorghum, emmer, spelt, secale, einkorn, teff, milo or oats.
[0380] 22. Harvestable parts of a plant according to embodiment 21, wherein said harvestable parts are preferably shoot biomass and/or seeds.
[0381] 23. Products derived from a plant according to embodiment 21 and/or from harvestable parts of a plant according to embodiment 22.
[0382] 24. Use of a nucleic acid encoding a VIM1-like polypeptide as defined in any of embodiments 1 to 12 for enhancing yield-related traits in plants relative to control plants, preferably for increasing yield, and more preferably for increasing seed yield and/or for increasing plant height in plants relative to control plants.
[0383] 25. A method for enhancing yield-related traits in plants relative to control plants, comprising modulating expression in a plant of a nucleic acid encoding a VTC2-like polypeptide, wherein said VTC2-like polypeptide comprises a HMMPanther PTHR20884 domain.
[0384] 26. Method according to embodiment 25, wherein said modulated expression is effected by introducing and expressing in a plant said nucleic acid encoding said VTC2-like polypeptide.
[0385] 27. Method according to embodiment 25 or 26, wherein said enhanced yield-related traits comprise increased yield relative to control plants, and preferably comprise increased seed yield relative to control plants.
[0386] 28. Method according to any one of embodiments 25 to 27, wherein said enhanced yield-related traits are obtained under non-stress conditions.
[0387] 29. Method according to any of embodiments 25 to 28, wherein said VTC2-like polypeptide comprises one or more of the following motifs:

(i) Motif 4:
(SEQ ID NO: 168)
WEDR[MFV][QA]RGLFRYDVTACETKVIPG[KE][LY]GF[IV]AQLNEGRHL
KKRPTEFRVD[KRQ]V,
(ii) Motif 5:
(SEQ ID NO: 169)
[DE][CR]LPQ[QR]ID[HPR][EKD]S[FL]LLA[VL][HYQ]MAAEA[GA][NS]PY
FR[LV]GYNSLGAFATINHLHFQAYYL,
(iii) Motif 6:
(SEQ ID NO: 170)
D[CS]G[KR][QR][IV]F[VL][LMF]PQCYAEKQALGEVS[PQ][DENVLMDE]
TQVNPAVWEISGH[MI]VLKR[KR][ETK]D[FY].

[0388] 30. Method according to any one of embodiments 25 to 29, wherein said nucleic acid encoding a VTC2-like is of plant origin, preferably from a dicotyledonous plant or a dicotyledonous plant.
[0389] 31. Method according to any one of embodiments 25 to 30, wherein said nucleic acid encoding a VTC2-like encodes any one of the polypeptides listed in Table A2 or is a portion of such a nucleic acid, or a nucleic acid capable of hybridising with such a nucleic acid.
[0390] 32. Method according to any one of embodiments 25 to 31, wherein said nucleic acid sequence encodes an orthologue or paralogue of any of the polypeptides given in Table A2.
[0391] 33. Method according to any one of embodiments 25 to 32, wherein said nucleic acid encoding said VTC2-like polypeptide corresponds to SEQ ID NO: 60 or SEQ ID NO: 62.
[0392] 34. Method according to any one of embodiments 25 to 33, wherein said nucleic acid is operably linked to a constitutive promoter, preferably to a medium strength constitutive promoter, preferably to a plant promoter, more preferably to a GOS2 promoter, most preferably to a GOS2 promoter from rice.
[0393] 35. Plant, plant part thereof, including seeds, or plant cell, obtainable by a method according to any one of embodiments 25 to 34, wherein said plant, plant part or plant cell comprises a recombinant nucleic acid encoding a VTC2-like polypeptide as defined in any of embodiments 25 and 29 to 33.
[0394] 36. Construct comprising:
   [0395] (i) nucleic acid encoding a VTC2-like as defined in any of embodiments 25 and 29 to 33;
   [0396] (ii) one or more control sequences capable of driving expression of the nucleic acid sequence of (i); and optionally
   [0397] (iii) a transcription termination sequence.
[0398] 37. Construct according to embodiment 36, wherein one of said control sequences is a constitutive promoter, preferably a medium strength constitutive promoter, preferably to a plant promoter, more preferably a GOS2 promoter, most preferably a GOS2 promoter from rice.
[0399] 38. Use of a construct according to embodiment 36 or 37 in a method for making plants having enhanced yield-related traits, preferably increased yield relative to control plants, and more preferably increased seed yield relative to control plants.
[0400] 39. Plant, plant part or plant cell transformed with a construct according to embodiment 36 or 37.
[0401] 40. Method for the production of a transgenic plant having enhanced yield-related traits relative to control plants, preferably increased yield relative to control plants, and more preferably increased seed yield relative to control plants, comprising:
   [0402] (i) introducing and expressing in a plant cell or plant a nucleic acid encoding a VTC2-like polypeptide as defined in any of embodiments 25 and 29 to 33; and
   [0403] (ii) cultivating said plant cell or plant under conditions promoting plant growth and development.
[0404] 41. Transgenic plant having enhanced yield-related traits relative to control plants, preferably increased yield relative to control plants, and more preferably increased seed yield, resulting from modulated expression of a nucleic acid encoding a VTC2-like polypeptide as defined in any of embodiments 25 and 29 to 33 or a transgenic plant cell derived from said transgenic plant.
[0405] 42. Transgenic plant according to embodiment 35, 39 or 41, or a transgenic plant cell derived therefrom, wherein said plant is a crop plant, such as beet, sugarbeet or alfalfa; or a monocotyledonous plant such as sugarcane; or a cereal, such as rice, maize, wheat, barley, millet, rye, triticale, sorghum, emmer, spelt, secale, einkorn, teff, milo or oats.
[0406] 43. Harvestable parts of a plant according to embodiment 42, wherein said harvestable parts are preferably seeds.
[0407] 44. Products derived from a plant according to embodiment 42 and/or from harvestable parts of a plant according to embodiment 43.
[0408] 45. Use of a nucleic acid encoding a VTC2-like polypeptide as defined in any of embodiments 25 and 29 to 33 for enhancing yield-related traits in plants relative to control plants, preferably for increasing yield, and more preferably for increasing seed yield in plants relative to control plants.
[0409] 46. A method for enhancing yield-related traits in plants relative to control plants, comprising modulating expression in a plant of a nucleic acid encoding a DUF1685 polypeptide, wherein said DUF1685 polypeptide comprises a conserved domain having at least 50% sequence identity to a DUF1685 domain as represented by amino acid coordinates 46 to 144 of SEQ ID NO: 188 (SEQ ID NO: 256).
[0410] 47. Method according to embodiment 46, wherein said modulated expression is effected by introducing and expressing in a plant said nucleic acid encoding said DUF1685 polypeptide.
[0411] 48. Method according to embodiment 46 or 47, wherein said enhanced yield-related traits comprise increased yield relative to control plants, and preferably comprise increased seed yield relative to control plants.
[0412] 49. Method according to any one of embodiments 46 to 48, wherein said enhanced yield-related traits are obtained under non-stress conditions.
[0413] 50. Method according to any one of embodiments 46 to 48, wherein said enhanced yield-related traits are obtained under conditions of drought stress, salt stress or nitrogen deficiency.
[0414] 51. Method according to any one of embodiments 46 to 50, wherein said DUF1685 polypeptide comprises a Motif 16 as represented by DLTDEDLHELKGCIELGFGF (SEQ ID NO: 258) and/or a Motif 17 as represented by LTNTLPALDLYFAV (SEQ ID NO: 259).
[0415] 52. Method according to any one of embodiments 46 to 51, wherein said nucleic acid encoding a DUF1685 polypeptide is of plant origin, preferably from a dicotyledonous plant, further preferably from the family Salicaceae, more preferably from the genus Populus, most preferably from Populus trichocarpa.
[0416] 53. Method according to any one of embodiments 46 to 52, wherein said nucleic acid encoding a DUF1685 polypeptide encodes any one of the polypeptides listed in Table A3 or is a portion of such a nucleic acid, or a nucleic acid capable of hybridising with such a nucleic acid.
[0417] 54. Method according to any one of embodiments 46 to 53, wherein said nucleic acid sequence encodes an orthologue or paralogue of any of the polypeptides given in Table A3.
[0418] 55. Method according to any one of embodiments 46 to 54, wherein said nucleic acid encodes the DUF1685 polypeptide as represented by SEQ ID NO: 188.
[0419] 56. Method according to any one of embodiments 46 to 55, wherein said nucleic acid is operably linked to a constitutive promoter, preferably a medium strength constitutive promoter, more preferably to a plant promoter, most preferably a GOS2 promoter.
[0420] 57. Plant, plant part thereof, including seeds, or plant cell, obtainable by a method according to any one of embodiments 46 to 56, wherein said plant, plant part or plant cell comprises a recombinant nucleic acid encoding a DUF1685 polypeptide as defined in any of embodiments 46 and 51 to 55.
[0421] 58. Construct comprising:
   [0422] (i) nucleic acid encoding a DUF1685 as defined in any of embodiments 46 and 51 to 55;
   [0423] (ii) one or more control sequences capable of driving expression of the nucleic acid sequence of (i); and optionally
   [0424] (iii) a transcription termination sequence.
[0425] 59. Construct according to embodiment 58, wherein one of said control sequences is a constitutive promoter, preferably a medium strength constitutive promoter, more preferably to a plant promoter, most preferably a GOS2 promoter.
[0426] 60. Use of a construct according to embodiment 58 or 59 in a method for making plants having enhanced yield-related traits, preferably increased yield relative to control plants, and more preferably increased seed yield relative to control plants.
[0427] 61. Plant, plant part or plant cell transformed with a construct according to embodiment 58 or 59.
[0428] 62. Method for the production of a transgenic plant having enhanced yield-related traits relative to control plants, preferably increased yield relative to control plants, and more preferably increased seed yield and/or increased biomass relative to control plants, comprising:
   [0429] (i) introducing and expressing in a plant cell or plant a nucleic acid encoding a DUF1685 polypeptide as defined in any of embodiments 46 and 51 to 55; and
   [0430] (ii) cultivating said plant cell or plant under conditions promoting plant growth and development.
[0431] 63. Transgenic plant having enhanced yield-related traits relative to control plants, preferably increased yield relative to control plants, and more preferably increased seed yield, resulting from modulated expression of a nucleic acid encoding DUF1685 polypeptide as defined in any of embodiments 46 and 51 to 55 or a transgenic plant cell derived from said transgenic plant.
[0432] 64. Transgenic plant according to embodiment 57, 61 or 63, or a transgenic plant cell derived therefrom, wherein said plant is a crop plant, such as beet, sugarbeet or alfalfa; or a monocotyledonous plant such as sugarcane; or a cereal, such as rice, maize, wheat, barley, millet, rye, triticale, sorghum, emmer, spelt, secale, einkorn, teff, milo or oats.
[0433] 65. Harvestable parts of a plant according to embodiment 64, wherein said harvestable parts are preferably shoot biomass and/or seeds.
[0434] 66. Products derived from a plant according to embodiment 64 and/or from harvestable parts of a plant according to embodiment 65.
[0435] 67. Use of a nucleic acid encoding a DUF1685 polypeptide as defined in any of embodiments 46 and 51 to 55 for enhancing yield-related traits in plants relative to control plants, preferably for increasing yield in plants relative to control plants, and more preferably for increasing seed yield in plants relative to control plants.
[0436] 68. A method for enhancing yield-related traits in plants relative to control plants, comprising modulating expression in a plant of a nucleic acid encoding a ARF6-like polypeptide, wherein said ARF6-like polypeptide comprises a B3 DNA binding domain, a Q rich domain, an auxin-responsive domain, and an Aux/IAA family domain.
[0437] 69. Method according to embodiment 68, wherein said modulated expression is effected by introducing and expressing in a plant said nucleic acid encoding said ARF6-like polypeptide.
[0438] 70. Method according to embodiment 68 or 69, wherein said enhanced yield-related traits comprise increased yield relative to control plants, and preferably comprise increased biomass and/or increased seed yield relative to control plants.
[0439] 71. Method according to any one of embodiments 68 to 70, wherein said enhanced yield-related traits are obtained under non-stress conditions.
[0440] 72. Method according to any one of embodiments 68 to 70, wherein said enhanced yield-related traits are obtained under conditions of drought stress, salt stress or nitrogen deficiency.
[0441] 73. Method according to any of embodiments 68 to 72, wherein said ARF6-like polypeptide comprises one or both of the following motifs:

(i) Motif 18:
(SEQ ID NO: 304)
VYFPQGHSEQVAAST,
(ii) Motif 19:
(SEQ ID NO: 305)
ATFVKVYK,

[0442] 74. Method according to any one of embodiments 68 to 73, wherein said nucleic acid encoding a ARF6-like is of plant origin, preferably from a monocotyledonous plant, further preferably from the family Poaceae, more preferably from the genus Oryza, most preferably from Oryza sativa.
[0443] 75. Method according to any one of embodiments 68 to 74, wherein said nucleic acid encoding a ARF6-like encodes any one of the polypeptides listed in Table A4 or is a portion of such a nucleic acid, or a nucleic acid capable of hybridising with such a nucleic acid.
[0444] 76. Method according to any one of embodiments 68 to 75, wherein said nucleic acid sequence encodes an orthologue or paralogue of any of the polypeptides given in Table A4.
[0445] 77. Method according to any one of embodiments 68 to 76, wherein said nucleic acid encodes the polypeptide represented by SEQ ID NO: 261.
[0446] 78. Method according to any one of embodiments 68 to 77, wherein said nucleic acid is operably linked to a constitutive promoter, preferably to a medium strength constitutive promoter, preferably to a plant promoter, more preferably to a GOS2 promoter, most preferably to a GOS2 promoter from rice.
[0447] 79. Plant, plant part thereof, including seeds, or plant cell, obtainable by a method according to any one of embodiments 68 to 78, wherein said plant, plant part or plant cell comprises a recombinant nucleic acid encoding a ARF6-like polypeptide as defined in any of embodiments 68 and 73 to 77.
[0448] 80. Construct comprising:
   [0449] (i) nucleic acid encoding a ARF6-like as defined in any of embodiments 68 and 73 to 77;
   [0450] (ii) one or more control sequences capable of driving expression of the nucleic acid sequence of (i); and optionally
   [0451] (iii) a transcription termination sequence.
[0452] 81. Construct according to embodiment 80, wherein one of said control sequences is a constitutive promoter, preferably a medium strength constitutive promoter, preferably to a plant promoter, more preferably a GOS2 promoter, most preferably a GOS2 promoter from rice.
[0453] 82. Use of a construct according to embodiment 80 or 81 in a method for making plants having enhanced yield-related traits, preferably increased yield relative to control plants, and more preferably increased seed yield and/or increased biomass relative to control plants.
[0454] 83. Plant, plant part or plant cell transformed with a construct according to embodiment 80 or 81.
[0455] 84. Method for the production of a transgenic plant having enhanced yield-related traits relative to control plants, preferably increased yield relative to control plants, and more preferably increased seed yield and/or increased biomass relative to control plants, comprising:
   [0456] (i) introducing and expressing in a plant cell or plant a nucleic acid encoding a ARF6-like polypeptide as defined in any of embodiments 68 and 73 to 77; and
   [0457] (ii) cultivating said plant cell or plant under conditions promoting plant growth and development.
[0458] 85. Transgenic plant having enhanced yield-related traits relative to control plants, preferably increased yield relative to control plants, and more preferably increased seed yield and/or increased biomass, resulting from modulated expression of a nucleic acid encoding a ARF6-like polypeptide as defined in any of embodiments 68 and 73 to 77 or a transgenic plant cell derived from said transgenic plant.
[0459] 86. Transgenic plant according to embodiment 69, 83 or 85, or a transgenic plant cell derived therefrom, wherein said plant is a crop plant, such as beet, sugarbeet or alfalfa; or a monocotyledonous plant such as sugarcane; or a cereal, such as rice, maize, wheat, barley, millet, rye, triticale, sorghum, emmer, spelt, secale, einkorn, teff, milo or oats.
[0460] 87. Harvestable parts of a plant according to embodiment 86, wherein said harvestable parts are preferably shoot biomass and/or seeds.
[0461] 88. Products derived from a plant according to embodiment 86 and/or from harvestable parts of a plant according to embodiment 87.
[0462] 89. Use of a nucleic acid encoding a ARF6-like polypeptide as defined in any of embodiments 68 and 73 to 77 for enhancing yield-related traits in plants relative to control plants, preferably for increasing yield, and more preferably for increasing seed yield and/or for increasing biomass in plants relative to control plants.

### DESCRIPTION OF FIGURES

[0463] The present invention will now be described with reference to the following figures in which:

[0464] FIG. 1 represents the domain structure of SEQ ID NO: 2 with conserved motifs 1 to 3.

[0465] FIG. 2 represents a multiple alignment of various VIM1-like polypeptides. These alignments can be used for defining further motifs, when using conserved amino acids.

[0466] FIG. 3 shows phylogenetic tree of VIM1-like polypeptides, Phylogenetic relationship of VIM1-like related proteins. The proteins were aligned using MAFFT (Katoh and Toh (2008). Briefings in Bioinformatics 9:286-298.).

[0467] FIG. 4 shows the MATGAT table (Example 3).

[0468] FIG. 5 represents the binary vector used for increased expression in Oryza sativa of a VIM1-like-encoding nucleic acid under the control of a rice GOS2 promoter (pGOS2).

[0469] FIG. 6 represents an alignment of SEQ ID NO: 61 and SEQ ID NO: 63 with indication of the PTHR20884 domain in bold.

[0470] FIG. 7 represents a multiple alignment of various monocotyledonous and dicotyledonous VTC2-like polypeptides. The asterisks indicate identical amino acids among the various protein sequences, colons represent highly conserved amino acid substitutions, and the dots represent less conserved amino acid substitution; on other positions there is no sequence conservation. These alignments can be used for defining further motifs, when using conserved amino acids.

[0471] FIG. 8 shows phylogenetic tree of VTC2-like polypeptides.

[0472] FIG. 9 shows the MATGAT table (Example 3).

[0473] FIG. 10 represents the binary vector used for increased expression in Oryza sativa of a VTC2-like-encoding nucleic acid under the control of a rice GOS2 promoter (pGOS2).

[0474] FIG. 11 represents the domain structure of SEQ ID NO: 188 with conserved DUF1685 domain (underlined).

[0475] FIG. 12 represents a multiple alignment of various DUF1685 polypeptides. The asterisks indicate identical amino acids among the various protein sequences, colons represent highly conserved amino acid substitutions, and the dots represent less conserved amino acid substitution; on other positions there is no sequence conservation. These alignments can be used for defining further motifs, when using conserved amino acids.

[0476] FIG. 13 shows the MATGAT table (Example 3)

[0477] FIG. 14 represents the binary vector used for increased expression in Oryza sativa of a DUF1685-encoding nucleic acid under the control of a rice GOS2 promoter (pGOS2).

[0478] FIG. 15 represents the domain structure of SEQ ID NO: 261 with conserved motifs or domains.

[0479] FIG. 16 represents the binary vector used for increased expression in Oryza sativa of a ARF6-like-encoding nucleic acid under the control of a rice GOS2 promoter (pGOS2).

[0480] FIG. 17 shows phylogenetic tree of ARF6-like polypeptides.

### EXAMPLES

[0481] The present invention will now be described with reference to the following examples, which are by way of illustration only. The following examples are not intended to limit the scope of the invention.

[0482] DNA manipulation: unless otherwise stated, recombinant DNA techniques are performed according to standard protocols described in (Sambrook (2001) Molecular Cloning: a laboratory manual, 3rd Edition Cold Spring Harbor Laboratory Press, CSH, New York) or in Volumes 1 and 2 of Ausubel et al. (1994), Current Protocols in Molecular Biology, Current Protocols. Standard materials and methods for plant molecular work are described in Plant Molecular Biology Labfax (1993) by R. D. D. Croy, published by BIOS Scientific Publications Ltd (UK) and Blackwell Scientific Publications (UK).

### Example 1

### Identification of Sequences Related to the Nucleic Acid Sequence Used in the Methods of Intervention

### 1. VIM1 (Variant in Methylation 1)-Like Polypeptides

[0483] Sequences (full length cDNA, ESTs or genomic) related to SEQ ID NO: 1 and SEQ ID NO: 2 were identified amongst those maintained in the Entrez Nucleotides database at the National Center for Biotechnology Information (NCBI) using database sequence search tools, such as the Basic Local Alignment Tool (BLAST) (Altschul et al. (1990) J. Mol. Biol. 215:403-410; and Altschul et al. (1997) Nucleic Acids Res. 25:3389-3402). The program is used to find regions of local similarity between sequences by comparing nucleic acid or polypeptide sequences to sequence databases and by calculating the statistical significance of matches. For example, the polypeptide encoded by the nucleic acid of SEQ ID NO: 1 was used for the TBLASTN algorithm, with default settings and the filter to ignore low complexity sequences set off. The output of the analysis was viewed by pairwise comparison, and ranked according to the probability score (E-value), where the score reflect the probability that a particular alignment occurs by chance (the lower the E-value, the more significant the hit). In addition to E-values, comparisons were also scored by percentage identity. Percentage identity refers to the number of identical nucleotides (or amino acids) between the two compared nucleic acid (or polypeptide) sequences over a particular length. In some instances, the default parameters may be adjusted to modify the stringency of the search. For example the E-value may be increased to show less stringent matches. This way, short nearly exact matches may be identified.

[0484] Table A1 provides a list of nucleic acid sequences and polypeptide sequences related to SEQ ID NO: 1 and SEQ ID NO: 2.

TABLE A1
Examples of VIM1-like nucleic acids and polypeptides:

| | Nucleic | Poly- |
|---|---|---|
| | acid | peptide |
| | SEQ | SEQ |
| Plant Source | ID NO: | ID NO: |
| Poptr_VIM1 | 1 | 2 |
| A.lyrata_315436#1 | 3 | 4 |
| A.lyrata_338526#1 | 5 | 6 |
| A.lyrata_908083#1 | 7 | 8 |
| A.lyrata_908084#1 | 9 | 10 |
| A.thaliana_AT1G57800.1#1 | 11 | 12 |
| A.thaliana_AT1G57820.1#1 | 13 | 14 |
| A.thaliana_AT1G66040.1#1 | 15 | 16 |
| A.thaliana_AT1G66050.1#1 | 17 | 18 |
| A.thaliana_AT5G39550.1#1 | 19 | 20 |
| G.max_Glyma02g47920.1#1 | 21 | 22 |
| G.max_Glyma12g00330.1#1 | 23 | 24 |
| G.max_Glyma14g00670.1#1 | 25 | 26 |
| M.truncatula_AC152919_52.5#1 | 27 | 28 |
| O.sativa_LOC_Os04g22240.1#1 | 29 | 30 |
| O.sativa_LOC_Os05g01230.1#1 | 31 | 32 |
| OS_C3H Group 26 | 33 | 34 |
| P.patens_123970#1 | 35 | 36 |
| P.patens_152968#1 | 37 | 38 |
| P.trichocarpa_817505#1 | 39 | 40 |
| S.bicolor_Sb09g000320.1#1 | 41 | 42 |
| S.moellendorffii_109372#1 | 43 | 44 |
| V.vinifera_GSVIVT00006203001#1 | 45 | 46 |
| Z.mays_TC464062#1 | 47 | 48 |
| Zea_mays_GRMZM2G162211_T01#1 | 49 | 50 |
| Zea_mays_GRMZM2G339151_T01#1 | 51 | 52 |

### 2. VTC2-Like (GDP-L-Galactose Phosphorylase) Polypeptides

[0485] Sequences (full length cDNA, ESTs or genomic) related to SEQ ID NO: 60 and SEQ ID NO: 61 were identified amongst those maintained in the Entrez Nucleotides database at the National Center for Biotechnology Information (NCBI) using database sequence search tools, such as the Basic Local Alignment Tool (BLAST) (Altschul et al. (1990) J. Mol. Biol. 215:403-410; and Altschul et al. (1997) Nucleic Acids Res. 25:3389-3402). The program is used to find regions of local similarity between sequences by comparing nucleic acid or polypeptide sequences to sequence databases and by calculating the statistical significance of matches. For example, the polypeptide encoded by the nucleic acid of SEQ ID NO: 60 was used for the TBLASTN algorithm, with default settings and the filter to ignore low complexity sequences set off. The output of the analysis was viewed by pairwise comparison, and ranked according to the probability score (E-value), where the score reflect the probability that a particular alignment occurs by chance (the lower the E-value, the more significant the hit). In addition to E-values, comparisons were also scored by percentage identity. Percentage identity refers to the number of identical nucleotides (or amino acids) between the two compared nucleic acid (or polypeptide) sequences over a particular length. In some instances, the default parameters may be adjusted to modify the stringency of the search. For example the E-value may be increased to show less stringent matches. This way, short nearly exact matches may be identified.

[0486] Table A2 provides a list of nucleic acid sequences and polypeptide sequences related to SEQ ID NO: 60 and SEQ ID NO: 61.

TABLE A2
Examples of VTC2-like nucleic acids and polypeptides:

| | Nucleic | Poly- |
|---|---|---|
| | acid | peptide |
| | SEQ | SEQ |
| Plant Source | ID NO: | ID NO: |
| A.thaliana_AT4G26850.1 | 60 | 61 |
| T.aestivum_TC292154 | 62 | 63 |
| A.lyrata_950164 | 64 | 65 |
| A.lyrata_492115 | 66 | 67 |
| A.thaliana_AT5G55120.1 | 68 | 69 |
| Actinidia_chinensis_EF379384 | 70 | 71 |
| Aquilegia_sp_TC25002 | 72 | 73 |
| B.napus_TC69198 | 74 | 75 |
| B.oleracea_TA6216_3712 | 76 | 77 |
| C.canephora_TC1251 | 78 | 79 |
| C.solstitialis_TA856_347529 | 80 | 81 |
| C.vulgaris_26809 | 82 | 83 |
| Chlorella_57139 | 84 | 85 |
| G.max_Glyma18g10430.1 | 86 | 87 |
| G.raimondii_TC2296 | 88 | 89 |
| H.annuus_TC50213 | 90 | 91 |
| H.exilis_TA34_400408 | 92 | 93 |
| H.tuberosus_TA1186_4233 | 94 | 95 |
| H.vulgare_TC173516 | 96 | 97 |
| Hordeum_vulgare_subsp_vulgare_AK252987 | 98 | 99 |
| M.crystallinum_TC10653 | 100 | 101 |
| M.truncatula_CT573504_5.5 | 102 | 103 |
| Malus_x_domestica_FJ752238 | 104 | 105 |
| Micromonas_RCC299_64582 | 106 | 107 |
| N.tabacum_TC42667 | 108 | 109 |
| Nicotiana_tabacum_EU700061 | 110 | 111 |
| O.sativa_LOC_Os01g67520.1 | 112 | 113 |
| O.sativa_LOC_Os12g08810.1 | 114 | 115 |
| P.patens_166416 | 116 | 117 |
| P.trichocarpa_scaff_II.2305 | 118 | 119 |
| P.trichocarpa_scaff_XI.532 | 120 | 121 |
| P.trifoliata_TA5154_37690 | 122 | 123 |
| P.virgatum_TC9360 | 124 | 125 |
| P.vulgaris_TC12206 | 126 | 127 |
| Picea_sitchensis_BT071031 | 128 | 129 |
| Picea_sitchensis_EF676523 | 130 | 131 |
| Picea_sitchensis_EF676802 | 132 | 133 |
| R.communis_TA1210_3988 | 134 | 135 |
| S.bicolor_Sb03g042900.1 | 136 | 137 |
| S.bicolor_Sb08g005410.1 | 138 | 139 |
| S.lycopersicum_TC192903 | 140 | 141 |
| S.moellendorffii_110588 | 142 | 143 |
| S.moellendorffii_139516 | 144 | 145 |
| S.moellendorffii_99090 | 146 | 147 |
| S.officinarum_TC84077 | 148 | 149 |
| S.rebaudiana_TA691_55670 | 150 | 151 |
| T.aestivum_TC280471 | 152 | 153 |
| P.trichocarpa_scaff_I.2538 | 154 | 155 |
| V.aestivalis_TA270_3605 | 156 | 157 |
| V.carteri_58668 | 158 | 159 |
| V.shuttleworthii_TA1731_246827 | 160 | 161 |
| V.vinifera_GSVIVT00027274001 | 162 | 163 |
| Z.mays_TC479409 | 164 | 165 |
| Z.mays_TC531664 | 166 | 167 |

### 3. DUF1685 Polypeptides

[0487] Sequences (full length cDNA, ESTs or genomic) related to SEQ ID NO: 187 and SEQ ID NO: 188 were identified amongst those maintained in the Entrez Nucleotides database at the National Center for Biotechnology Information (NCBI) using database sequence search tools, such as the Basic Local Alignment Tool (BLAST) (Altschul et al. (1990) J. Mol. Biol. 215:403-410; and Altschul et al. (1997) Nucleic Acids Res. 25:3389-3402). The program is used to find regions of local similarity between sequences by comparing nucleic acid or polypeptide sequences to sequence databases and by calculating the statistical significance of matches. For example, the polypeptide encoded by the nucleic acid of SEQ ID NO: 187 was used for the TBLASTN algorithm, with default settings and the filter to ignore low complexity sequences set off. The output of the analysis was viewed by pairwise comparison, and ranked according to the probability score (E-value), where the score reflect the probability that a particular alignment occurs by chance (the lower the E-value, the more significant the hit). In addition to E-values, comparisons were also scored by percentage identity. Percentage identity refers to the number of identical nucleotides (or amino acids) between the two compared nucleic acid (or polypeptide) sequences over a particular length. In some instances, the default parameters may be adjusted to modify the stringency of the search. For example the E-value may be increased to show less stringent matches. This way, short nearly exact matches may be identified.

[0488] Table A3 provides a list of nucleic acid sequences and polypeptide sequences related to SEQ ID NO: 187 and SEQ ID NO: 188.

TABLE A3
Examples of DUF1685 nucleic acids and polypeptides:

| | | Nucleic acid | Polypeptide |
|---|---|---|---|
| Plant Source | Accession number | SEQ ID NO: | SEQ ID NO: |
| Populus sp | PT00G11895 | 187 | 188 |
| Arabidopsis thaliana | AT1G05870 | 189 | 190 |
| Arabidopsis thaliana | AT1G08790 | 191 | 192 |
| Arabidopsis thaliana | AT2G15590 | 193 | 194 |
| Arabidopsis thaliana | AT2G15610 | 195 | 196 |
| Arabidopsis thaliana | AT2G31560 | 197 | 198 |
| Arabidopsis thaliana | AT2G43340 | 199 | 200 |
| Arabidopsis thaliana | AT3G04700 | 201 | 202 |
| Arabidopsis thaliana | AT3G50350 | 203 | 204 |
| Arabidopsis thaliana | AT4G33985 | 205 | 206 |
| Arabidopsis thaliana | AT5G28690 | 207 | 208 |
| Carica papaya | CP00055G01480 | 209 | 210 |
| Carica papaya | CP00062G00050 | 211 | 212 |
| Carica papaya | CP00071G00120 | 213 | 214 |
| Carica papaya | CP01244G00020 | 215 | 216 |
| Oryza sativa | OS02G26170 | 217 | 218 |
| Oryza sativa | OS02G52770 | 219 | 220 |
| Oryza sativa | OS04G21340 | 221 | 222 |
| Oryza sativa | OS11G17930 | 223 | 224 |
| Oryza sativa | OS12G12880 | 225 | 226 |
| Populus sp | PT05G05100 | 227 | 228 |
| Populus sp | PT07G01980 | 229 | 230 |
| Populus sp | PT07G08600 | 231 | 232 |
| Populus sp | PT09G06660 | 233 | 234 |
| Populus sp | PT13G03890 | 235 | 236 |
| Sorghum bicolor | SB03G042740 | 237 | 238 |
| Sorghum bicolor | SB04G012950 | 239 | 240 |
| Sorghum bicolor | SB04G034180 | 241 | 242 |
| Sorghum bicolor | SB05G010050 | 243 | 244 |
| Sorghum bicolor | SB06G005440 | 245 | 246 |
| Sorghum bicolor | SB08G007690 | 247 | 248 |
| Vitis vinifera | VV00G03890 | 249 | 250 |
| Vitis vinifera | VV07G11360 | 251 | 252 |

### 4. ARF6-Like (Auxin Responsive Factor) Polypeptides

[0489] Sequences (full length cDNA, ESTs or genomic) related to SEQ ID NO: 260 and SEQ ID NO: 261 were identified amongst those maintained in the Entrez Nucleotides database at the National Center for Biotechnology Information (NCBI) using database sequence search tools, such as the Basic Local Alignment Tool (BLAST) (Altschul et al. (1990) J. Mol. Biol. 215:403-410; and Altschul et al. (1997) Nucleic Acids Res. 25:3389-3402). The program is used to find regions of local similarity between sequences by comparing nucleic acid or polypeptide sequences to sequence databases and by calculating the statistical significance of matches. For example, the polypeptide encoded by the nucleic acid of SEQ ID NO: 260 was used for the TBLASTN algorithm, with default settings and the filter to ignore low complexity sequences set off. The output of the analysis was viewed by pairwise comparison, and ranked according to the probability score (E-value), where the score reflect the probability that a particular alignment occurs by chance (the lower the E-value, the more significant the hit). In addition to E-values, comparisons were also scored by percentage identity. Percentage identity refers to the number of identical nucleotides (or amino acids) between the two compared nucleic acid (or polypeptide) sequences over a particular length. In some instances, the default parameters may be adjusted to modify the stringency of the search. For example the E-value may be increased to show less stringent matches. This way, short nearly exact matches may be identified.

[0490] Table A4 provides a list of nucleic acid sequences and polypeptide sequences related to SEQ ID NO: 260 and SEQ ID NO: 261.

TABLE A4
Examples of ARF6-like nucleic acids and polypeptides:

| | Nucleic | Poly- |
|---|---|---|
| | acid | peptide |
| | SEQ | SEQ |
| Plant Source | ID NO: | ID NO: |
| Oryza sativa | 260 | 261 |
| O. sativa NM_001052528 | 262 | 263 |
| O. sativa NM_001064895 | 264 | 265 |
| O. sativa NM_001073798 | 266 | 267 |
| A. thaliana NM_001036038 | 268 | 269 |
| S. bicolor XM_002451554 | 270 | 271 |
| S. bicolor XM_002438806 | 272 | 273 |
| T. aestivum AK334329 | 274 | 275 |
| V. vinifera XM_002279772 | 276 | 277 |
| C. sativus AB112673 | 278 | 279 |
| P. trichocarpa XM_002316737 | 280 | 281 |
| C. sativus AB112674 | 282 | 283 |
| S. melongena FJ597628 | 284 | 285 |
| O. sativa AB071294 | 286 | 287 |
| R. communis XM_002532937 | 288 | 289 |
| V. vinifera XM_002282794 | 290 | 291 |
| S. bicolor XM_002443509 | 292 | 293 |
| G. max AK243812 | 294 | 295 |
| O. sativa AB071295 | 296 | 297 |
| Z. mays NM_001152807 | 298 | 299 |
| P. trichocarpa XM_002298803 | 300 | 301 |
| S. lycopersicum GQ360036 | 302 | 303 |

[0491] Sequences have been tentatively assembled and publicly disclosed by research institutions, such as The Institute for Genomic Research (TIGR; beginning with TA). For instance, the Eukaryotic Gene Orthologs (EGO) database may be used to identify such related sequences, either by keyword search or by using the BLAST algorithm with the nucleic acid sequence or polypeptide sequence of interest. Special nucleic acid sequence databases have been created for particular organisms, e.g. for certain prokaryotic organisms, such as by the Joint Genome Institute. Furthermore, access to proprietary databases, has allowed the identification of novel nucleic acid and polypeptide sequences.

### Example 2

### Alignment of Sequences to the Polypeptide Sequences Used in the Methods of the Invention

### 1. VIM1 (Variant in Methylation 1)-Like Polypeptides

[0492] The alignment as shown in FIG. 2, was generated using MAFFT (Katoh and Toh (2008)—Briefings in Bioinformatics 9: 286-298). The phylogram as shown in FIG. 3, was drawn using Dendroscope (Huson et al. (2007), BMC Bioinformatics 8(1):460). Confidence for 100 bootstrap repetitions is indicated for major branching.

### 2. VTC2-Like (GDP-L-Galactose Phosphorylase) Polypeptides

[0493] Alignment of polypeptide sequences was performed using the ClustalW 2.0 algorithm of progressive alignment (Thompson et al. (1997) Nucleic Acids Res 25:4876-4882; Chema et al. (2003). Nucleic Acids Res 31:3497-3500) with standard setting (slow alignment, similarity matrix: Gonnet, gap opening penalty 10, gap extension penalty: 0.2). Minor manual editing was done to further optimise the alignment. The VTC2-like polypeptides are aligned in FIG. 7.

[0494] A phylogenetic tree of HWS-like polypeptides (FIG. 8) was constructed by aligning HWS-like sequences using MAFFT (Katoh and Toh (2008)—Briefings in Bioinformatics 9:286-298). A neighbour-joining tree was calculated using Quick-Tree (Howe et al. (2002), Bioinformatics 18(11): 1546-7), 100 bootstrap repetitions. The dendrogram was drawn using Dendroscope (Huson et al. (2007), BMC Bioinformatics 8(1):460). Confidence levels for 100 bootstrap repetitions are indicated for major branchings.

### 3. DUF1685 Polypeptides

[0495] Alignment of polypeptide sequences was performed using the ClustalW (1.81) algorithm of progressive alignment (Thompson et al. (1997) Nucleic Acids Res 25:4876-4882; Chema et al. (2003). Nucleic Acids Res 31:3497-3500) with standard setting (slow alignment, similarity matrix: Gonnet, gap opening penalty 10, gap extension penalty: 0.2). Minor manual editing was done to further optimise the alignment. An alignment of DUF1685 polypeptides is represented in FIG. 13.

### 4. ARF6-Like (Auxin Responsive Factor) Polypeptides

[0496] Alignment of polypeptide sequences is performed using the ClustalW 2.0 algorithm of progressive alignment (Thompson et al. (1997) Nucleic Acids Res 25:4876-4882; Chema et al. (2003). Nucleic Acids Res 31:3497-3500) with standard setting (slow alignment, similarity matrix: Gonnet, gap opening penalty 10, gap extension penalty: 0.2). Minor manual editing is done to further optimise the alignment.

[0497] A phylogenetic tree of ARF6-like polypeptides (FIG. 17) is constructed by aligning ARF6-like sequences using MAFFT (Katoh and Toh (2008)—Briefings in Bioinformatics 9:286-298). A neighbour-joining tree is calculated using Quick-Tree (Howe et al. (2002), Bioinformatics 18(11): 1546-7), 100 bootstrap repetitions. The dendrogram is drawn using Dendroscope (Huson et al. (2007), BMC Bioinformatics 8(1):460). Confidence levels for 100 bootstrap repetitions are indicated for major branchings.

### Example 3

### Calculation of Global Percentage Identity Between Polypeptide Sequences Useful in Performing the Methods of the Invention

[0498] Global percentages of similarity and identity between full length polypeptide sequences useful in performing the methods of the invention were determined using one of the methods available in the art, the MatGAT (Matrix Global Alignment Tool) software (BMC Bioinformatics. 2003 4:29. MatGAT: an application that generates similarity/identity matrices using protein or DNA sequences. Campanella J J, Bitincka L, Smalley J; software hosted by Ledion Bitincka). MatGAT software generates similarity/identity matrices for DNA or protein sequences without needing pre-alignment of the data. The program performs a series of pair-wise alignments using the Myers and Miller global alignment algorithm (with a gap opening penalty of 12, and a gap extension penalty of 2), calculates similarity and identity using for example Blosum 62 (for polypeptides), and then places the results in a distance matrix.

### 1. VIM 1 (Variant in Methylation 1)-Like Polypeptides

[0499] Results of the software analysis are shown in FIG. 4 for the global similarity and identity over the full length of the polypeptide sequences. Sequence similarity is shown in the bottom half of the dividing line and sequence identity is shown in the top half of the diagonal dividing line. Parameters used in the comparison were: Scoring matrix: Blosum62, First Gap: 12, Extending Gap: 2. The sequence identity (in %) between the VIM1-like polypeptide sequences useful in performing the methods of the invention can be as low as 36.2% (is generally higher than 36.2%) compared to SEQ ID NO: 2.

TABLE B1
Description of proteins in FIG. 4:

```
  1.Poptr_VIM1
  2. A.lyrata_315436
  3. A.lyrata_338526
  4. A.lyrata_908083
  5. A.lyrata_908084
  6. A.thaliana_AT1G57800.1
  7. A.thaliana_AT1G57820.1
  8. A.thaliana_AT1G66040.1
  9. A.thaliana_AT1G66050.1
10. A.thaliana_AT5G39550.1
11. G.max_Glyma02g47920.1
12. G.max_Glyma12g00330.1
13. G.max_Glyma14g00670.1
14. M.truncatula_AC152919_52.5
15. O.sativa_LOC_Os04g22240.1
16. O.sativa_LOC_Os05g01230.1
17. OS_C3HGroup26
18. P.patens_123970
19. P.patens_152968
20. P.trichocarpa_817505
21. S.bicolor_Sb09g000320.1
22. S.moellendorffii_109372
23. V.vinifera_GSVIVT00006203001
24. Z.mays_TC464062
25. Zea_mays_GRMZM2G162211_T01
26. Zea_mays_GRMZM2G339151_T01
```

### 2. VTC2-Like (GDP-L-Galactose Phosphorylase) Polypeptides

[0500] Results of the software analysis are shown in FIG. 9 for the global similarity and identity over the full length of the polypeptide sequences of monocot and dicot VTC2-like proteins. Sequence similarity is shown in the bottom half of the dividing line and sequence identity is shown in the top half of the diagonal dividing line. Parameters used in the comparison were: Scoring matrix: Blosum62, First Gap: 12, Extending Gap: 2. The sequence identity (in %) between the VTC2-like polypeptide sequences useful in performing the methods of the invention can be as low as 43% compared to SEQ ID NO: 61 or SEQ ID NO: 63.

### 3. DUF1685 Polypeptides

[0501] Results of the software analysis are shown in FIG. 13 for the global similarity and identity over the full length of the polypeptide sequences. Sequence similarity is shown in the bottom half of the dividing line and sequence identity is shown in the top half of the diagonal dividing line. Parameters used in the comparison were: Scoring matrix: Blosum62, First Gap: 12, Extending Gap: 2. The sequence identity (in %) between the DUF1685 polypeptide sequences useful in performing the methods of the invention is generally higher than 25% compared to SEQ ID NO: 188.

[0502] Results of the software analysis for the global similarity and identity over the full length of the polypeptide sequences for a subgroup of polypeptides is represented in Table B2. The illustrated DUF1685 polypeptides all belong to the gene family of HOMO00944 (as determined using PLAZA, The Plant Cell 21: 3718-3731), and the ORTHO008516 subfamily.

TABLE B2

| | 1 | 2 | 3 | 4 | 5 | 6 | 7 |
|---|---|---|---|---|---|---|---|
| 1. PT00G11895 | | 63.4 | 68.4 | 40.4 | 73.2 | 39.6 | 67.8 |
| 2. AT1G08790 | 73.2 | | 59.3 | 41.2 | 58.8 | 40.4 | 63.3 |
| 3. CP01244G00020 | 79.3 | 72.7 | | 44.5 | 60 | 41.7 | 66.3 |
| 4. OS04G21340 | 51.1 | 54.4 | 53.2 | | 41.4 | 66 | 44.1 |
| 5. PT13G03890 | 76.3 | 66.3 | 67.5 | 48.9 | | 37.8 | 61.9 |
| 6. SB06G005440 | 53.1 | 51.5 | 54 | 75.3 | 48.5 | | 42.9 |
| 7. VV00G03890 | 78.8 | 73.6 | 77.2 | 53.2 | 69.5 | 53.6 | |

### Example 4

### Identification of Domains Comprised in Polypeptide Sequences Useful in Performing the Methods of the Invention

[0503] The Integrated Resource of Protein Families, Domains and Sites (InterPro) database is an integrated interface for the commonly used signature databases for text- and sequence-based searches. The InterPro database combines these databases, which use different methodologies and varying degrees of biological information about well-characterized proteins to derive protein signatures. Collaborating databases include SWISS-PROT, PROSITE, TrEMBL, PRINTS, Propom and Pfam, Smart and TIGRFAMs. Pfam is a large collection of multiple sequence alignments and hidden Markov models covering many common protein domains and families. Pfam is hosted at the Sanger Institute server in the United Kingdom. Interpro is hosted at the European Bioinformatics Institute in the United Kingdom.

### 1. VIM1 (Variant in Methylation 1)-Like Polypeptides

[0504] The results of the InterPro scan (InterPro database, release 26.0) of the polypeptide sequence as represented by SEQ ID NO: 2 are presented in Table C1.

TABLE C1
InterPro scan results (major accession numbers) of the
polypeptide sequence as represented by SEQ ID NO: 2.

| | Accession | Accession | Amino acid coordinates |
|---|---|---|---|
| Database | number | name | on SEQ ID NO 2: |
| HMMPfam | PF02182 | YDG_SRA | 265-415 |
| HMMPfam | PF00097 | C3HC4 RING-type | 135-173 |
| HMMPfam | PF00097 | C3HC4 RING-type | 508-564 |
| HMMSmart | SM00249 | PHD-finger | 10-57 |

[0505] In an embodiment a VIM1-like polypeptide comprises a conserved domain (or motif) with at least 70%, 71%, 72%, 73%, 74%, 75%, 76%, 77%, 78%, 79%, 80%, 81%, 82%, 83%, 84%, 85%, 86%, 87%, 88%, 89%, 90%, 91%, 92%, 93%, 94%, 95%, 96%, 97%, 98%, or 99% sequence identity to a conserved domain of amino acid coordinates 265 to 415, 135 to 173, 508 to 564 and/or 10 to 57 of SEQ ID NO: 2.

### 2. VTC2-Like (GDP-L-Galactose Phosphorylase) Polypeptides

[0506] The results of the InterPro scan (InterPro database, release 28.0) of the polypeptide sequence as represented by SEQ ID NO: 61 are presented in Table C2.

TABLE C2
InterPro scan results (major accession numbers) of the
polypeptide sequence as represented by SEQ ID NO: 61.

| | Accession | Accession | Amino acid coordinates | Amino acid coordinates |
|---|---|---|---|---|
| Database | number | name | on SEQ ID NO 61 | on SEQ ID NO 63 |
| HMMPanther | PTHR20884 | Family not | 2-442 | 5-426 |
| | | named | | |
| HMMPanther | PTHR20884:SF3 | Subfamily not | 2-442 | 5-426 |
| | | named | | |

[0507] In an embodiment a VTC2-like polypeptide comprises a conserved domain (or motif) with at least 70%, 71%, 72%, 73%, 74%, 75%, 76%, 77%, 78%, 79%, 80%, 81%, 82%, 83%, 84%, 85%, 86%, 87%, 88%, 89%, 90%, 91%, 92%, 93%, 94%, 95%, 96%, 97%, 98%, or 99% sequence identity to the conserved domain with amino acid coordinates 2 to 442 in SEQ ID NO: 61 or with amino acid coordinates 5 to 426 in SEQ ID NO: 63.

### 3. DUF1685 Polypeptides

[0508] The results of the InterPro scan (InterPro database: release 28.0) of the polypeptide sequence as represented by SEQ ID NO: 188 are presented in Table C3.

TABLE C3
InterPro scan results (major accession numbers) of the
polypeptide sequence as represented by SEQ ID NO: 188.

| Database | Number | Name | Start | Stop | p-value | Accession |
|---|---|---|---|---|---|---|
| Pfam (version 24.0) | PF07939 | DUF1685 | 46 | 144 | 1.10E−42 | IPR012881 |

### 4. ARF6-Like (Auxin Responsive Factor) Polypeptides

[0509] The results of the InterPro scan (InterPro database, http://www.ebi.ac.uk/interpro/) of the polypeptide sequence as represented by SEQ ID NO: 261 are presented in Table C4.

TABLE C4
InterPro scan results (major accession numbers) of the
polypeptide sequence as represented by SEQ ID NO: 261.

| | Accession | Accession | Amino acid coordinates |
|---|---|---|---|
| Database | number | name | on SEQ ID NO 261 |
| | IPR003340 | PF02326 | 134 to 236 |
| | IPR010525 | PF06507 | 260 to 343 |
| | IPR003311 | PF02309 | 729 to 868 |

### Example 5

### Topology Prediction of the Polypeptide Sequences Useful in Performing the Methods of Invention

[0510] TargetP 1.1 predicts the subcellular location of eukaryotic proteins. The location assignment is based on the predicted presence of any of the N-terminal pre-sequences: chloroplast transit peptide (cTP), mitochondrial targeting peptide (mTP) or secretory pathway signal peptide (SP). Scores on which the final prediction is based are not really probabilities, and they do not necessarily add to one. However, the location with the highest score is the most likely according to TargetP, and the relationship between the scores (the reliability class) may be an indication of how certain the prediction is. The reliability class (RC) ranges from 1 to 5, where 1 indicates the strongest prediction. TargetP is maintained at the server of the Technical University of Denmark.

[0511] For the sequences predicted to contain an N-terminal presequence a potential cleavage site can also be predicted.

[0512] A number of parameters are selected, such as organism group (non-plant or plant), cutoff sets (none, predefined set of cutoffs, or user-specified set of cutoffs), and the calculation of prediction of cleavage sites (yes or no).

[0513] Many other algorithms can be used to perform such analyses, including:
[0514] ChloroP 1.1 hosted on the server of the Technical University of Denmark;
[0515] Protein Prowler Subcellular Localisation Predictor version 1.2 hosted on the server of the Institute for Molecular Bioscience, University of Queensland, Brisbane, Australia;
[0516] PENCE Proteome Analyst PA-GOSUB 2.5 hosted on the server of the University of Alberta, Edmonton, Alberta, Canada;
[0517] TMHMM, hosted on the server of the Technical University of Denmark
[0518] PSORT (URL: psort.org)
[0519] PLOC (Park and Kanehisa, Bioinformatics, 19, 1656-1663, 2003).

### 1. VTC2-Like (GDP-L-Galactose Phosphorylase) Polypeptides

[0520] The results of TargetP 1.1 analysis of the polypeptide sequence as represented by SEQ ID NO: 61 and SEQ ID NO: 63 are presented Table D1 and D2. The “plant” organism group has been selected, no cutoffs defined, and the predicted length of the transit peptide requested. The subcellular localization of the polypeptide sequence as represented by both SEQ ID NO: 61 and SEQ ID NO: 63 may be the cytoplasm or nucleus, no transit peptide is predicted.

TABLE D1
TargetP 1.1 analysis of the polypeptide sequence as
represented by SEQ ID NO: 61

| Name | Len | cTP | mTP | SP | other | Loc | RC | TPlen |
|---|---|---|---|---|---|---|---|---|
| AtVTC2 | 442 | 0.045 | 0.236 | 0.069 | 0.842 | — | 2 | — |
| cutoff | | 0.000 | 0.000 | 0.000 | 0.000 | | | |

Abbreviations: Len, Length;
cTP, Chloroplastic transit peptide;
mTP, Mitochondrial transit peptide,
SP, Secretory pathway signal peptide,
other, Other subcellular targeting,
Loc, Predicted Location;
RC, Reliability class;
TPlen, Predicted transit peptide length.

TABLE D2
TargetP 1.1 analysis of the polypeptide sequence as
represented by SEQ ID NO: 63.

| Name | Len | cTP | mTP | SP | other | Loc | RC | TPlen |
|---|---|---|---|---|---|---|---|---|
| TaVTC2 | 431 | 0.058 | 0.132 | 0.110 | 0.867 | — | 2 | — |
| cutoff | | 0.000 | 0.000 | 0.000 | 0.000 | | | |

Abbreviations: Len, Length;
cTP, Chloroplastic transit peptide;
mTP, Mitochondrial transit peptide,
SP, Secretory pathway signal peptide,
other, Other subcellular targeting,
Loc, Predicted Location;
RC, Reliability class;
TPlen, Predicted transit peptide length.

### Example 6

### Assay Related to the Polypeptide Sequences Useful in Performing the Methods of the Invention

### 1. VIM1 (Variant in Methylation 1)-Like Polypeptides

[0521] VIM1-like proteins regulate DNA methylation and are functional ubiquitin E3 ligases as described by Kraft et al., The Plant Journal (2008) 56, 704-715.

### 2. VTC2-Like (GDP-L-Galactose Phosphorylase) Polypeptides

[0522] VTC2 activity can be measured as described by Linster et al., (2007): Phosphorylase activity of purified recombinant A. thaliana VTC2 is assayed by measuring GDP formation after incubation with various GDP-hexoses in a reaction mixture at pH 7.5 containing 50 mM Tris-HCl, 5 mM sodium phosphate, 2 mM MgCl₂, 10 mM NaCl, and 1 mM dithiothreitol. Reactions (26° C.) are initiated with enzyme and stopped after 5 to 60 min by heating at 98° C. for 3 min. After removal of precipitated protein by centrifugation, supernatants are analyzed by anion-exchange HPLC on a Partisil SAX column (10 μm bead size, 4.6×250 mm; Alltech Associates, Deerfield, Ill.) using a Hewlett Packard Series II 1090 liquid chromatograph. A gradient of 0.01-0.5 M NH₄H₂PO₄, pH 3.7, is used at a flow rate of 2 ml/min. Nucleotides are detected by absorbance at 254 nm using a reference wavelength of 450 nm. GMP, GDP-hexoses, and GDP elute at approximately 13, 17, and 24 min, respectively. To assay the enzymatic activity in the reverse direction (hexose 1-phosphate+GDP→GDP-hexose+Pi), GDP-hexose concentration is measured by the anion-exchange HPLC method after incubation of VTC2 with various hexose 1-phosphates and 5 mM GDP as described above, except that sodium phosphate and MgCl₂ are omitted. GDP and GDP-hexose concentrations are calculated by comparing the integrated peak areas with those of standard GDP or GDP-D-Man solutions. GDP-L-Galactose and GDP-D-Glucose were identified as good substrates for assaying VTC2 activity (Linster et al., 2007).

### 3. ARF6-Like (Auxin Responsive Factor) Polypeptides

[0523] An assay to measure the functional activity of an ARF6-like has been described in Ulmasov et al., 1997, Vol. 9, pages 1963-1971).

### Example 7

### Cloning of the Nucleic Acid Sequence Used in Methods of the Invention

### 1. VIM1 (Variant in Methylation 1)-Like Polypeptides

[0524] The nucleic acid sequence was amplified by PCR using as template a custom-made Populus trichocarpa seedlings cDNA library. PCR was performed using Hifi Taq DNA polymerase in standard conditions, using 200 ng of template in a 50 μl PCR mix. The primers used were prm15909 (SEQ ID NO: 58; sense): 5′-ggggacaagtttgtacaaaaaagcagg cttaaacaatggaactcccgtgcg-3′ and prm15910 (SEQ ID NO: 59; reverse, complementary): 5′-ggggaccactttgtacaagaaagctgggtgctccagcatacgttattgac-3′, which include the AttB sites for Gateway recombination. The amplified PCR fragment was purified also using standard methods. The first step of the Gateway procedure, the BP reaction, was then performed, during which the PCR fragment recombined in vivo with the pDONR201 plasmid to produce, according to the Gateway terminology, an “entry clone”, pVIM1-like. Plasmid pDONR201 was purchased from Invitrogen, as part of the Gateway® technology.

[0525] The entry clone comprising SEQ ID NO: 1 was then used in an LR reaction with a destination vector used for Oryza sativa transformation. This vector contained as functional elements within the T-DNA borders: a plant selectable marker; a screenable marker expression cassette; and a Gateway cassette intended for LR in vivo recombination with the nucleic acid sequence of interest already cloned in the entry clone. A rice GOS2 promoter (SEQ ID NO: 57) for constitutive specific expression was located upstream of this Gateway cassette.

[0526] After the LR recombination step, the resulting expression vector pGOS2::VIM1-like (FIG. 5) was transformed into Agrobacterium strain LBA4044 according to methods well known in the art.

### 2. VTC2-Like (GDP-L-Galactose Phosphorylase) Polypeptides

[0527] The nucleic acid sequence was amplified by PCR using as template a custom-made Arabidopsis thaliana seedlings cDNA library for SEQ ID NO: 60 and a custom-made Triticum aestivum seedlings cDNA library for SEQ ID NO: 62. PCR was performed using Hifi Taq DNA polymerase in standard conditions, using 200 ng of template in a 50 μl PCR mix. The primers used cloning SEQ ID NO: 60 were prm15125 (SEQ ID NO: 183; sense): 5′-ggggacaagtttgtacaaaaaagcaggcttaaacaatgttgaaaatcaaaagagtt-3′ and prm15126 (SEQ ID NO: 184; reverse, complementary): 5′-ggggaccactttgtacaagaaagctgggtatacatacaaaccaccaa gtc-3′. For cloning SEQ ID NO: 62, the following PCR primers were used: 5′-ggggacaa gtttgtacaaaaaagcaggcttaaacaatggagatgaagctgacgatt-3′ (prm15127, SEQ ID NO: 185) and prm15128 (SEQ ID NO: 186; reverse, complementary): 5′-ggggaccactttgtacaagaaagctggg tcgaacctagcgatctgaaaga-3′, which all include the AttB sites for Gateway recombination.

[0528] The amplified PCR fragment was purified also using standard methods. The first step of the Gateway procedure, the BP reaction, was then performed, during which the PCR fragment recombined in vivo with the pDONR201 plasmid to produce, according to the Gateway terminology, an “entry clone”, pVTC2-like, comprising either SEQ ID NO: 60 or SEQ ID NO: 62. Plasmid pDONR201 was purchased from Invitrogen, as part of the Gateway® technology.

[0529] The entry clone comprising SEQ ID NO: 60 or SEQ ID NO: 62 was then used in an LR reaction with a destination vector used for Oryza sativa transformation. This vector contained as functional elements within the T-DNA borders: a plant selectable marker; a screenable marker expression cassette; and a Gateway cassette intended for LR in vivo recombination with the nucleic acid sequence of interest already cloned in the entry clone. A rice GOS2 promoter (SEQ ID NO: 180) for constitutive expression was located upstream of this Gateway cassette.

[0530] After the LR recombination step, the resulting expression vector pGOS2::VTC2-like (comprising either SEQ ID NO: 60 or SEQ ID NO: 62, FIG. 10) was transformed into Agrobacterium strain LBA4044 according to methods well known in the art.

### 3. DUF1685 Polypeptides

[0531] The nucleic acid sequence of the present example was amplified by PCR using as template a custom-made Populus trichocarpa seedlings cDNA library. PCR was performed using Hifi Taq DNA polymerase in standard conditions, using 200 ng of template in a 50 μl PCR mix. The primers used were prm16186 (SEQ ID NO: 253; sense, start codon in bold): 5′-ggggacaagtttgtacaaaaaagcaggcttaaacaatgaagaactgtcatgagcct-3′ and prm16187 (SEQ ID NO: 254; reverse, complementary): 5′-ggggaccactttgtacaagaaagctgggtagctctgtacaatctatcccg-3′, which include the AttB sites for Gateway recombination. The amplified PCR fragment was purified also using standard methods. The first step of the Gateway procedure, the BP reaction, was then performed, during which the PCR fragment recombined in vivo with the pDONR201 plasmid to produce, according to the Gateway terminology, an “entry clone”, pDUF. Plasmid pDONR201 was purchased from Invitrogen, as part of the Gateway® technology.

[0532] The entry clone comprising SEQ ID NO: 187 was then used in an LR reaction with a destination vector used for Oryza sativa transformation. This vector contained as functional elements within the T-DNA borders: a plant selectable marker; a screenable marker expression cassette; and a Gateway cassette intended for LR in vivo recombination with the nucleic acid sequence of interest already cloned in the entry clone. A rice GOS2 promoter (SEQ ID NO: 255) for constitutive specific expression was located upstream of this Gateway cassette.

[0533] After the LR recombination step, the resulting expression vector pGOS2::DUF (FIG. 14) was transformed into Agrobacterium strain LBA4044 according to methods well known in the art.

### 4. ARF6-Like (Auxin Responsive Factor) Polypeptides

[0534] The nucleic acid sequence was amplified by PCR using as template a custom-made Oryza sativa seedlings cDNA library. PCR was performed using a commercially available proofreading Taq DNA polymerase in standard conditions, using 200 ng of template in a 50 μl PCR mix.

[0535] The primers used were prm09655 (SEQ ID NO: 311; sense, start codon in bold): 5′-ggggacaagtttgtacaaaaaagcaggcttaaacaatgaagctctcgccgtc-3′ and prm09656 (SEQ ID NO: 312; reverse, complementary): 5′-ggggaccactttgtacaagaaagctgggttgctatgagctccctatttct-3′, which include the AttB sites for Gateway recombination. The amplified PCR fragment was purified also using standard methods. The first step of the Gateway procedure, the BP reaction, was then performed, during which the PCR fragment recombined in vivo with the pDONR201 plasmid to produce, according to the Gateway terminology, an “entry clone”. Plasmid pDONR201 was purchased from Invitrogen, as part of the Gateway® technology.

[0536] The entry clone comprising SEQ ID NO: 260 was then used in an LR reaction with a destination vector used for Oryza sativa transformation. This vector contained as functional elements within the T-DNA borders: a plant selectable marker; a screenable marker expression cassette; and a Gateway cassette intended for LR in vivo recombination with the nucleic acid sequence of interest already cloned in the entry clone. A rice GOS2 promoter (SEQ ID NO: 310) for constitutive expression was located upstream of this Gateway cassette.

[0537] After the LR recombination step, the resulting expression vector pGOS2::ARF6-like (FIG. 16) was transformed into Agrobacterium strain LBA4044 according to methods well known in the art.

### Example 8

### Plant Transformation

### Rice Transformation

[0538] The Agrobacterium containing the expression vector was used to transform Oryza sativa plants. Mature dry seeds of the rice japonica cultivar Nipponbare were dehusked. Sterilization was carried out by incubating for one minute in 70% ethanol, followed by 30 minutes in 0.2% HgCl₂, followed by a 6 times 15 minutes wash with sterile distilled water. The sterile seeds were then germinated on a medium containing 2,4-D (callus induction medium). After incubation in the dark for four weeks, embryogenic, scutellum-derived calli were excised and propagated on the same medium. After two weeks, the calli were multiplied or propagated by subculture on the same medium for another 2 weeks. Embryogenic callus pieces were sub-cultured on fresh medium 3 days before co-cultivation (to boost cell division activity).

[0539] Agrobacterium strain LBA4404 containing the expression vector was used for co-cultivation. Agrobacterium was inoculated on AB medium with the appropriate antibiotics and cultured for 3 days at 28° C. The bacteria were then collected and suspended in liquid co-cultivation medium to a density (OD₆₀₀) of about 1. The suspension was then transferred to a Petri dish and the calli immersed in the suspension for 15 minutes. The callus tissues were then blotted dry on a filter paper and transferred to solidified, co-cultivation medium and incubated for 3 days in the dark at 25° C. Co-cultivated calli were grown on 2,4-D-containing medium for 4 weeks in the dark at 28° C. in the presence of a selection agent. During this period, rapidly growing resistant callus islands developed. After transfer of this material to a regeneration medium and incubation in the light, the embryogenic potential was released and shoots developed in the next four to five weeks. Shoots were excised from the calli and incubated for 2 to 3 weeks on an auxin-containing medium from which they were transferred to soil. Hardened shoots were grown under high humidity and short days in a greenhouse.

[0540] Approximately 35 to 90 independent T0 rice transformants were generated for one construct. The primary transformants were transferred from a tissue culture chamber to a greenhouse. After a quantitative PCR analysis to verify copy number of the T-DNA insert, only single copy transgenic plants that exhibit tolerance to the selection agent were kept for harvest of T1 seed. Seeds were then harvested three to five months after transplanting. The method yielded single locus transformants at a rate of over 50% (Aldemita and Hodges 1996, Chan et al. 1993, Hiei et al. 1994).

### Example 9

### Transformation of Other Crops

### Corn Transformation

[0541] Transformation of maize (Zea mays) is performed with a modification of the method described by Ishida et al. (1996) Nature Biotech 14(6): 745-50. Transformation is genotype-dependent in corn and only specific genotypes are amenable to transformation and regeneration. The inbred line A188 (University of Minnesota) or hybrids with A188 as a parent are good sources of donor material for transformation, but other genotypes can be used successfully as well. Ears are harvested from corn plant approximately 11 days after pollination (DAP) when the length of the immature embryo is about 1 to 1.2 mm. Immature embryos are cocultivated with Agrobacterium tumefaciens containing the expression vector, and transgenic plants are recovered through organogenesis. Excised embryos are grown on callus induction medium, then maize regeneration medium, containing the selection agent (for example imidazolinone but various selection markers can be used). The Petri plates are incubated in the light at 25° C. for 2-3 weeks, or until shoots develop. The green shoots are transferred from each embryo to maize rooting medium and incubated at 25° C. for 2-3 weeks, until roots develop. The rooted shoots are transplanted to soil in the greenhouse. T1 seeds are produced from plants that exhibit tolerance to the selection agent and that contain a single copy of the T-DNA insert.

### Wheat Transformation

[0542] Transformation of wheat is performed with the method described by Ishida et al. (1996) Nature Biotech 14(6): 745-50. The cultivar Bobwhite (available from CIMMYT, Mexico) is commonly used in transformation. Immature embryos are co-cultivated with Agrobacterium tumefaciens containing the expression vector, and transgenic plants are recovered through organogenesis. After incubation with Agrobacterium, the embryos are grown in vitro on callus induction medium, then regeneration medium, containing the selection agent (for example imidazolinone but various selection markers can be used). The Petri plates are incubated in the light at 25° C. for 2-3 weeks, or until shoots develop. The green shoots are transferred from each embryo to rooting medium and incubated at 25° C. for 2-3 weeks, until roots develop. The rooted shoots are transplanted to soil in the greenhouse. T1 seeds are produced from plants that exhibit tolerance to the selection agent and that contain a single copy of the T-DNA insert.

### Soybean Transformation

[0543] Soybean is transformed according to a modification of the method described in the Texas A&M U.S. Pat. No. 5,164,310. Several commercial soybean varieties are amenable to transformation by this method. The cultivar Jack (available from the Illinois Seed foundation) is commonly used for transformation. Soybean seeds are sterilised for in vitro sowing. The hypocotyl, the radicle and one cotyledon are excised from seven-day old young seedlings. The epicotyl and the remaining cotyledon are further grown to develop axillary nodes. These axillary nodes are excised and incubated with Agrobacterium tumefaciens containing the expression vector. After the cocultivation treatment, the explants are washed and transferred to selection media. Regenerated shoots are excised and placed on a shoot elongation medium. Shoots no longer than 1 cm are placed on rooting medium until roots develop. The rooted shoots are transplanted to soil in the greenhouse. T1 seeds are produced from plants that exhibit tolerance to the selection agent and that contain a single copy of the T-DNA insert.

### Rapeseed/Canola Transformation

[0544] Cotyledonary petioles and hypocotyls of 5-6 day old young seedling are used as explants for tissue culture and transformed according to Babic et al. (1998, Plant Cell Rep 17: 183-188). The commercial cultivar Westar (Agriculture Canada) is the standard variety used for transformation, but other varieties can also be used. Canola seeds are surface-sterilized for in vitro sowing. The cotyledon petiole explants with the cotyledon attached are excised from the in vitro seedlings, and inoculated with Agrobacterium (containing the expression vector) by dipping the cut end of the petiole explant into the bacterial suspension. The explants are then cultured for 2 days on MSBAP-3 medium containing 3 mg/l BAP, 3% sucrose, 0.7 Phytagar at 23° C., 16 hr light. After two days of co-cultivation with Agrobacterium, the petiole explants are transferred to MSBAP-3 medium containing 3 mg/l BAP, cefotaxime, carbenicillin, or timentin (300 mg/l) for 7 days, and then cultured on MSBAP-3 medium with cefotaxime, carbenicillin, or timentin and selection agent until shoot regeneration. When the shoots are 5-10 mm in length, they are cut and transferred to shoot elongation medium (MSBAP-0.5, containing 0.5 mg/l BAP). Shoots of about 2 cm in length are transferred to the rooting medium (MS0) for root induction. The rooted shoots are transplanted to soil in the greenhouse. T1 seeds are produced from plants that exhibit tolerance to the selection agent and that contain a single copy of the T-DNA insert.

### Alfalfa Transformation

[0545] A regenerating clone of alfalfa (Medicago sativa) is transformed using the method of (McKersie et al., 1999 Plant Physiol 119: 839-847). Regeneration and transformation of alfalfa is genotype dependent and therefore a regenerating plant is required. Methods to obtain regenerating plants have been described. For example, these can be selected from the cultivar Rangelander (Agriculture Canada) or any other commercial alfalfa variety as described by Brown DCW and A Atanassov (1985. Plant Cell Tissue Organ Culture 4: 111-112). Alternatively, the RA3 variety (University of Wisconsin) has been selected for use in tissue culture (Walker et al., 1978 Am J Bot 65:654-659). Petiole explants are cocultivated with an overnight culture of Agrobacterium tumefaciens C58C1 pMP90 (McKersie et al., 1999 Plant Physiol 119: 839-847) or LBA4404 containing the expression vector. The explants are cocultivated for 3 d in the dark on SH induction medium containing 288 mg/L Pro, 53 mg/L thioproline, 4.35 g/L K2SO4, and 100 μm acetosyringinone. The explants are washed in half-strength Murashige-Skoog medium (Murashige and Skoog, 1962) and plated on the same SH induction medium without acetosyringinone but with a suitable selection agent and suitable antibiotic to inhibit Agrobacterium growth. After several weeks, somatic embryos are transferred to BOi2Y development medium containing no growth regulators, no antibiotics, and 50 g/L sucrose. Somatic embryos are subsequently germinated on half-strength Murashige-Skoog medium. Rooted seedlings were transplanted into pots and grown in a greenhouse. T1 seeds are produced from plants that exhibit tolerance to the selection agent and that contain a single copy of the T-DNA insert.

### Cotton Transformation

[0546] Cotton is transformed using Agrobacterium tumefaciens according to the method described in U.S. Pat. No. 5,159,135. Cotton seeds are surface sterilised in 3% sodium hypochlorite solution during 20 minutes and washed in distilled water with 500 μg/ml cefotaxime. The seeds are then transferred to SH-medium with 50 μg/ml benomyl for germination. Hypocotyls of 4 to 6 days old seedlings are removed, cut into 0.5 cm pieces and are placed on 0.8% agar. An Agrobacterium suspension (approx. 108 cells per ml, diluted from an overnight culture transformed with the gene of interest and suitable selection markers) is used for inoculation of the hypocotyl explants. After 3 days at room temperature and lighting, the tissues are transferred to a solid medium (1.6 g/l Gelrite) with Murashige and Skoog salts with B5 vitamins (Gamborg et al., Exp. Cell Res. 50:151-158 (1968)), 0.1 mg/l 2,4-D, 0.1 mg/l 6-furfurylaminopurine and 750 μg/ml MgCL2, and with 50 to 100 μg/ml cefotaxime and 400-500 μg/ml carbenicillin to kill residual bacteria. Individual cell lines are isolated after two to three months (with subcultures every four to six weeks) and are further cultivated on selective medium for tissue amplification (30° C., 16 hr photoperiod). Transformed tissues are subsequently further cultivated on non-selective medium during 2 to 3 months to give rise to somatic embryos. Healthy looking embryos of at least 4 mm length are transferred to tubes with SH medium in fine vermiculite, supplemented with 0.1 mg/l indole acetic acid, 6 furfurylaminopurine and gibberellic acid. The embryos are cultivated at 30° C. with a photoperiod of 16 hrs, and plantlets at the 2 to 3 leaf stage are transferred to pots with vermiculite and nutrients. The plants are hardened and subsequently moved to the greenhouse for further cultivation.

### Example 10

### Phenotypic Evaluation Procedure

### 10.1 Evaluation Setup

[0547] Approximately 35 to 90 independent T0 rice transformants were generated. The primary transformants were transferred from a tissue culture chamber to a greenhouse for growing and harvest of T1 seed. Six events, of which the T1 progeny segregated 3:1 for presence/absence of the transgene, were retained. For each of these events, approximately 9 or 10 T1 seedlings containing the transgene (hetero- and homo-zygotes) and approximately 9 or 10 T1 seedlings lacking the transgene (nullizygotes) were selected by monitoring visual marker expression. The transgenic plants and the corresponding nullizygotes were grown side-by-side at random positions. Greenhouse conditions were of shorts days (12 hours light), 28° C. in the light and 22° C. in the dark, and a relative humidity of 70%. Plants grown under non-stress conditions were watered at regular intervals to ensure that water and nutrients were not limiting and to satisfy plant needs to complete growth and development.

[0548] From the stage of sowing until the stage of maturity the plants were passed several times through a digital imaging cabinet. At each time point digital images (2048×1536 pixels, 16 million colours) were taken of each plant from at least 6 different angles.

[0549] T1 events can be further evaluated in the T2 generation following the same evaluation procedure as for the T1 generation, e.g. with less events and/or with more individuals per event.

### Drought Screen

[0550] T1 or T2 plants are grown in potting soil under normal conditions until they approached the heading stage. They are then transferred to a “dry” section where irrigation is withheld. Soil moisture probes are inserted in randomly chosen pots to monitor the soil water content (SWC). When SWC goes below certain thresholds, the plants are automatically re-watered continuously until a normal level is reached again. The plants are then re-transferred again to normal conditions. The rest of the cultivation (plant maturation, seed harvest) is the same as for plants not grown under abiotic stress conditions. Growth and yield parameters are recorded as detailed for growth under normal conditions.

### Nitrogen Use Efficiency Screen

[0551] T1 or T2 plants are grown in potting soil under normal conditions except for the nutrient solution. The pots are watered from transplantation to maturation with a specific nutrient solution containing reduced N nitrogen (N) content, usually between 7 to 8 times less. The rest of the cultivation (plant maturation, seed harvest) is the same as for plants not grown under abiotic stress. Growth and yield parameters are recorded as detailed for growth under normal conditions.

### Salt Stress Screen

[0552] T1 or T2 plants are grown on a substrate made of coco fibers and particles of baked clay (Argex) (3 to 1 ratio). A normal nutrient solution is used during the first two weeks after transplanting the plantlets in the greenhouse. After the first two weeks, 25 mM of salt (NaCl) is added to the nutrient solution, until the plants are harvested. Growth and yield parameters are recorded as detailed for growth under normal conditions.

### 10.2 Statistical Analysis: F Test

[0553] A two factor ANOVA (analysis of variants) was used as a statistical model for the overall evaluation of plant phenotypic characteristics. An F test was carried out on all the parameters measured of all the plants of all the events transformed with the gene of the present invention. The F test was carried out to check for an effect of the gene over all the transformation events and to verify for an overall effect of the gene, also known as a global gene effect. The threshold for significance for a true global gene effect was set at a 5% probability level for the F test. A significant F test value points to a gene effect, meaning that it is not only the mere presence or position of the gene that is causing the differences in phenotype.

### 10.3 Parameters Measured

[0554] From the stage of sowing until the stage of maturity the plants were passed several times through a digital imaging cabinet. At each time point digital images (2048×1536 pixels, 16 million colours) were taken of each plant from at least 6 different angles as described in WO2010/031780. These measurements were used to determine different parameters.

### Biomass-Related Parameter Measurement

[0555] The plant aboveground area (or leafy biomass) was determined by counting the total number of pixels on the digital images from aboveground plant parts discriminated from the background. This value was averaged for the pictures taken on the same time point from the different angles and was converted to a physical surface value expressed in square mm by calibration. Experiments show that the aboveground plant area measured this way correlates with the biomass of plant parts above ground. The above ground area is the area measured at the time point at which the plant had reached its maximal leafy biomass.

[0556] Increase in root biomass is expressed as an increase in total root biomass (measured as maximum biomass of roots observed during the lifespan of a plant); or as an increase in the root/shoot index, measured as the ratio between root mass and shoot mass in the period of active growth of root and shoot. In other words, the root/shoot index is defined as the ratio of the rapidity of root growth to the rapidity of shoot growth in the period of active growth of root and shoot. Root biomass can be determined using a method as described in WO 2006/029987.

### Parameters Related to Development Time

[0557] The early vigour is the plant aboveground area three weeks post-germination. Early vigour was determined by counting the total number of pixels from aboveground plant parts discriminated from the background. This value was averaged for the pictures taken on the same time point from different angles and was converted to a physical surface value expressed in square mm by calibration.

[0558] Early seedling vigour is the seedling aboveground area when the plantlets of about 4 cm high.

[0559] AreaEmer is an indication of quick early development when this value is decreased compared to control plants. It is the ratio (expressed in %) between the time a plant needs to make 30% of the final biomass and the time needs to make 90% of its final biomass.

[0560] The “time to flower” or “flowering time” of the plant can be determined using the method as described in WO 2007/093444.

### Seed-Related Parameter Measurements

[0561] The mature primary panicles were harvested, counted, bagged, barcode-labelled and then dried for three days in an oven at 37° C. The panicles were then threshed and all the seeds were collected and counted. The seeds are usually covered by a dry outer covering, the husk. The filled husks (herein also named filled florets) were separated from the empty ones using an air-blowing device. The empty husks were discarded and the remaining fraction was counted again. The filled husks were weighed on an analytical balance.

[0562] The total number of seeds was determined by counting the number of filled husks that remained after the separation step. The total seed weight was measured by weighing all filled husks harvested from a plant.

[0563] The total number of florets per plant was determined by counting the number of husks (whether filled or not) harvested from a plant.

[0564] Thousand Kernel Weight (TKW) is extrapolated from the number of seeds counted and their total weight.

[0565] The Harvest Index (HI) in the present invention is defined as the ratio between the total seed weight and the above ground area (mm²), multiplied by a factor 10⁶.

[0566] The total number of flowers per panicle as defined in the present invention is the ratio between the total number of seeds and the number of mature primary panicles.

[0567] The “seed fill rate” or “seed filling rate” as defined in the present invention is the proportion (expressed as a %) of the number of filled florets (i.e. florets containing seeds) over the total number of florets. In other words, the seed filling rate is the percentage of florets that are filled with seed.

### Example 11

### Results of the Phenotypic Evaluation of the Transgenic Plants

### 1. VIM1 (Variant in Methylation 1)-Like Polypeptides

[0568] The results of the evaluation of transgenic rice plants in the T1 generation and expressing a nucleic acid encoding the VIM1-like polypeptide of SEQ ID NO: 2 under non-stress conditions are presented below in Table E1. When grown under non-stress conditions, an increase of at least 5% was observed for GravityYMax, which is the height of the gravity centre of the leafy biomass and HeightMax, which is the height of the highest tip of the plant; and for seed yield, including total weight of seeds, number of filled seeds, fill rate and harvest index.

TABLE E1
Data summary for transgenic rice plants; for each
parameter, the overall percent increase is shown,
for each parameter the p-value is <0.05.

| Parameter | Overall increase |
|---|---|
| Total weight of seeds | 19.2 |
| fillrate | 30.6 |
| harvestindex | 20.9 |
| Number of filled seeds | 16.7 |
| HeightMax | 6.8 |
| GravityYMax | 6.1 |

### 2. VTC2-Like (GDP-L-Galactose Phosphorylase) Polypeptides

[0569] The results of the evaluation of rice plants transformed with SEQ ID NO: 60 and grown under non-stress conditions are presented in Table E2. An increase of more than 5% was observed for total weight of seeds, fillrate, harvest index, and thousand kernel weight (TKW).

TABLE E2
Data summary for transgenic rice plants grown under non-stress
conditions; for each parameter, the overall percent increase
is shown, and for each parameter the p-value is <0.05.

| Parameter | Overall increase |
|---|---|
| totalwgseeds | 8.9 |
| harvestindex | 8.8 |
| fillrate | 6.7 |
| TKW | 4.0 |

[0570] Furthermore it was observed that rice plants transformed with a VTC2-like gene of poplar (P.trichocarpa_scaff_I.2538), under control the rice GOS2 promoter also showed increased seed yield: two out of six tested lines had one or more of increased fillrate, increased harvest index and increased thousand kernel weight.

[0571] The results of the evaluation of rice plants transformed with SEQ ID NO: 62 and grown under non-stress conditions are presented in Table E3. An increase of more than 5% was observed for total weight of seeds, fillrate, harvest index, and number of filled seeds.

TABLE E3
Data summary for transgenic rice plants grown under non-stress
conditions; for each parameter, the overall percent increase
is shown, and for each parameter the p-value is <0.05.

| Parameter | Overall increase |
|---|---|
| totalwgseeds | 18.2% |
| harvestindex | 15.6% |
| fillrate | 11.1 |
| nrfilledseed | 14.6 |

### 3. DUF1685 Polypeptides

[0572] The results of the evaluation of transgenic rice plants in the T2 generation and expressing a nucleic acid encoding the DUF1685 polypeptide of SEQ ID NO: 188 under non-stress conditions are presented below in Table E4. When grown under non-stress conditions, an increase of at least 5% was observed for seed yield including total seed weight, fill rate, thousand kernel weight and harvest index.

TABLE E4
Data summary for transgenic rice plants; for each parameter,
the overall percent increase is shown for the confirmation
(T2 generation), for each parameter the p-value is <0.05.

| Parameter | Overall increase |
|---|---|
| totalwgseeds | 17.1 |
| fillrate | 8.9 |
| harvestindex | 13.8 |
| thousand kernel weight (TKW) | 5.1 |

### 4. ARF6-Like (Auxin Responsive Factor) Polypeptides

[0573] The results of the evaluation of transgenic rice plants in the T2 generation and expressing a nucleic acid comprising the longest Open Reading Frame in SEQ ID NO: 260 under non-stress conditions are presented below. See previous Examples for details on the generations of the transgenic plants. The results of the evaluation of transgenic rice plants under non-stress conditions are presented below. An increase of more than 5% was observed for total root biomass (RootMax), aboveground biomass (AreaMax), number of seeds, seed fill rate, number of flowers per panicle.

[0574] The results of the evaluation of transgenic rice plants in the T2 generation and expressing a nucleic acid encoding the ARF6 polypeptide of SEQ ID NO: 261 under non-stress conditions are presented below in Table E5. When grown under non-stress conditions, an increase of at least 5% was observed for aboveground biomass (AreaMax), root biomass (RootMax and RootThickMax), and for seed yield (including total weight of seeds, number of seeds, fill rate, harvest index). In addition, plants expressing a ARF6 nucleic acid showed a faster growth rate (a shorter time (in days) needed between sowing and the day the plant reaches 90% of its final biomass (AreaCycle) and an earlier start of flowering (TimetoFlower: time (in days) between sowing and the emergence of the first panicle).

TABLE E5
Data summary for transgenic rice plants; for each parameter,
the overall percent increase is shown for the confirmation
(T2 generation), for each parameter the p-value is <0.05.

| Parameter | Overall change |
|---|---|
| AreaMax | 7.9 |
| RootShInd | −5.7 |
| totalwgseeds | −15.0 |
| nrtotalseed | 12.2 |
| fillrate | −20.3 |
| harvestindex | −19.4 |
| firstpan | 16.8 |
| nrfilledseed | −13.5 |

MEGA

1-87. (canceled)

88. A method for enhancing a yield-related trait in a plant relative to a corresponding control plant, comprising modulating expression in a plant of a nucleic acid encoding one of:
(i) a VIM1-like polypeptide, wherein said VIM1-like polypeptide comprises an Interpro accession IPR019787, corresponding to PFAM accession number SM00249 plant homeodomain (PHD) domain; an Interpro accession IPR018957, corresponding to PFAM accession number PF00097 really interesting new gene (RING) domain and an Interpro accession IPR003105, corresponding to PFAM accession number PF02182 Set Ring Associated (SRA) domain;
(ii) a VTC2-like polypeptide, wherein said VTC2-like polypeptide comprises a HMMPanther PTHR20884 domain;
(iii) a DUF1685 polypeptide, wherein said DUF1685 polypeptide comprises a conserved domain having at least 50% sequence identity to a DUF1685 domain as represented by amino acid coordinates 46 to 144 of SEQ ID NO: 188; or
(iv) an ARF6-like polypeptide, wherein said ARF6-like polypeptide comprises a B3 DNA binding domain, a Q rich domain, an auxin-responsive domain, and an Aux/IAA family domain.

89. The method according to claim 88, wherein said modulated expression is effected by introducing and expressing in a plant said nucleic acid encoding said VIM1-like polypeptide, said VTC2-like polypeptide, said DUF1685 polypeptide, or said ARF6-like polypeptide.

90. The method according to claim 88, wherein said enhanced yield-related trait comprises increased yield, increased plant height, increased seed yield, and/or increased biomass relative to a corresponding control plant.

91. The method according to claim 88, wherein said enhanced yield-related trait is obtained under non-stress conditions.

92. The method according to claim 88, wherein said enhanced yield-related trait is obtained under conditions of drought stress, salt stress, or nitrogen deficiency.

93. The method according to claim 88, wherein
a) said VIM1-like polypeptide comprises one or more of the following motifs:
(i) Motif 1:
(SEQ ID NO: 53)
RQWGAH[LF]PHVAGIAGQS[TA][YHV]GAQSVALSGGY[IED]DDED
HGEWFLYTGSGGRDL,
(ii) Motif 2:
(SEQ ID NO: 54)
F[DE][KN][ML]N[EA]ALR[LV]SC[LK]KGYPVRVVRSHKEKRS
[AS]YAPE[TES]GV,
(iii) Motif 3:
(SEQ ID NO: 55)
A[YF]TTERAK[KR][AT]GKANA[CSA]SG[KQ]IFVT[VI][AP]
PDHFGPI[PL]AENDP[ET]RN[MQ]GVLVG[ED][IST]W;
b) said VTC2-like polypeptide comprises one or more of the following motifs:
(i) Motif 4:
(SEQ ID NO: 168)
WEDR[MFV][QA]RGLFRYDVTACETKVIPG[KE][LY]GF[IV]AQLNEGRH
LKKRPTEFRVD[KRQ]V,
(ii) Motif 5:
(SEQ ID NO: 169)
[DE][CR]LPQ[QR]ID[HPR][EKD]S[FL]LLA[VL][HYQ]MAAEA[GA][NS]PY
FR[LV]GYNSLGAFATINHLHFQAYYL,
(iii) Motif 6:
(SEQ ID NO: 170)
D[CS]G[KR][QR][IV]F[VL][LMF]PQCYAEKQALGEVS[PQ][DE][VL]L[DE]
TQVNPAVWEISGH[MI]VLKR[KR][ETK]D[FY];
c) said DUF1685 polypeptide comprises a Motif 16 as represented by DLTDEDLHELKGCIELGFGF (SEQ ID NO: 258) and/or a Motif 17 as represented by LTNTLPALDLYFAV (SEQ ID NO: 259); or
d) said ARF6-like polypeptide comprises one or both of the following motifs:
(i) Motif 18:
(SEQ ID NO: 304)
VYFPQGHSEQVAAST,
(ii) Motif 19:
(SEQ ID NO: 305)
ATFVKVYK,

94. The method according to claim 88, wherein said nucleic acid
(i) encoding a VIM1-like polypeptide is of plant origin, from a dicotyledonous plant, from the family Salicaceae, from the genus Populus, or from Populus trichocarpa;
(ii) encoding a VTC2-like is of plant origin, or from a monocotyledonous plant;
(iii) encoding a DUF1685 polypeptide encodes any one of the polypeptides listed in Table A3 or is a portion of such a nucleic acid, or a nucleic acid capable of hybridizing with such a nucleic acid; or
(iv) encoding an ARF6-like is of plant origin, from a monocotyledonous plant, from the family Poaceae, from the genus Oryza, or from Oryza sativa.

95. The method according to claim 88, wherein said nucleic acid encoding
(i) a VIM1-like polypeptide encodes any one of the polypeptides listed in Table A1 or is a portion of such a nucleic acid, or a nucleic acid capable of hybridizing with such a nucleic acid;
(ii) a VTC2-like encodes any one of the polypeptides listed in Table A2 or is a portion of such a nucleic acid, or a nucleic acid capable of hybridizing with such a nucleic acid;
(iii) a DUF1685 polypeptide encodes any one of the polypeptides listed in Table A3 or is a portion of such a nucleic acid, or a nucleic acid capable of hybridizing with such a nucleic acid; or
(iv) an ARF6-like encodes any one of the polypeptides listed in Table A4 or is a portion of such a nucleic acid, or a nucleic acid capable of hybridizing with such a nucleic acid.

96. The method according to claim 88, wherein said nucleic acid sequence encodes an orthologue or paralogue of any of the polypeptides given in Tables A1, A2, A3 or A4.

97. The method according to claim 88, wherein said nucleic acid encodes one of:
(i) the VIM1-like polypeptide of SEQ ID NO: 2;
(ii) the VTC2-like polypeptide of SEQ ID NO: 60 or SEQ ID NO: 62;
(iii) the DUF1685 polypeptide of SEQ ID NO: 188;
(iv) the ARF6-like polypeptide of SEQ ID NO: 261.

98. The method according to claim 88, wherein said nucleic acid is operably linked to a constitutive promoter, a medium strength constitutive promoter, a plant promoter, a GOS2 promoter, or a GOS2 promoter from rice.

99. A transgenic plant, plant part, seed, or plant cell, obtained by the method of claim 88, wherein said plant, plant part, seed or plant cell comprises a recombinant nucleic acid encoding a polypeptide as defined in claim 88.

100. A construct comprising:
(i) a nucleic acid encoding a polypeptide as defined in claim 88;
(ii) one or more control sequences capable of driving expression of the nucleic acid sequence of (i); and optionally
(iii) a transcription termination sequence.

101. The construct according to claim 100, wherein one of said control sequences is a constitutive promoter, a medium strength constitutive promoter, a plant promoter, a GOS2 promoter, or a GOS2 promoter from rice.

102. A method for making a plants having an enhanced yield-related trait, increased yield, increased seed yield, increased plant height, and/or increased biomass, relative to a corresponding control plant comprising transforming a plant, plant part or plant cell with the construct of claim 100.

103. A plant, plant part, or plant cell transformed with the construct according to claim 100.

104. A method for the production of a transgenic plant having an enhanced yield-related trait, increased yield, increased seed yield, increased plant height, and/or increased biomass relative to a corresponding control plant, comprising:
(i) introducing and expressing in a plant cell or plant a nucleic acid encoding a polypeptide as defined in claim 88; and
(ii) cultivating said plant cell or plant under conditions promoting plant growth and development.

105. A transgenic plant having an enhanced yield-related trait, increased yield, increased seed yield, increased plant height, and/or increased biomass resulting from modulated expression of a nucleic acid encoding a polypeptide as defined in claim 88 or a transgenic plant cell derived from said transgenic plant.

106. A transgenic plant according to claim 99, or a transgenic plant cell derived therefrom, wherein said plant is a crop plant, beet, sugarbeet, alfalfa, a monocotyledonous plant, sugarcane, a cereal, rice, maize, wheat, barley, millet, rye, triticale, sorghum, emmer, spelt, secale, einkorn, teff, milo, or oats.

107. Harvestable parts of the plant according to claim 106, wherein said harvestable parts are shoot biomass and/or seeds.

108. Products derived from the plant according to claim 106 and/or from harvestable parts of said plant.

The application's sequence listing, which the Patent Office published only in electronic form, follows.

SEQUENCE LISTING (312 sequences)

SEQ ID NO: 1 - DNA, 2028 bp, Populus trichocarpa
atggaactcccgtgcgacggagccggcatttgcatggtctgcaaaaacaagccaccaagtgaagagaccctcgcgtgcaaaacatgtgtcaccccctggcacgccacgtgtctcgtctccccccctcaggcgctttctgatacgctgcaatgggagtgccctgactgctccatgattcatccgccgtccacttccgccttcgcctccggaagatcggaggattccggtgatctcatcgcgtcgattcggaagatcgaggatgacaaatcgttgactgaacaggagaaggcaaagaaacgtcaggagctgttgaatggcgccgccgctggtccgtcctcattggacggcgaggaaaagaaagagaagaatgacgtccttgatatactcgataaggagttgacttgctctttctgcatgcaaatgcttgatagaccggttacaactccatgcggtcataacttttgcttgaagtgcttccagagatggattggacaagggaaacgtacatgtgcatattgccgtgtacaaatcccacccaagatagcaagccagcctcgtatcaattctacacttgttattgccatacgtatggcaaggatgtcaagatccagcaatgctgggggtgctgcgaaggtatatcattttgtccacaaccaaaacaggccagacaaagcatacacaacagagcgggcaaagaaagctggcaaggctaatgcttgtagtgggaagatctttgtcacagttgctcctgatcactttgggccaatccctgcagagaacgacccagaaagaaatatgggtgttttggtgggagagatatgggaggataggctggcatgcaggcaatggggtgcccatctcccccatgttgcaggaattgctggtcagtctacttatggcgcgcaatcggtggctctttctggaggttatattgatgacgaggaccatggtgaatggtttctttacactgggagtggaggaagggacctgagcggcaataaacgcacaaacaaggaccagtcctttgaccaaaagtttgacaagatgaacgaggcactacgattaagctgcctaaagggctatcctgtaagagtggttaggtctcacaaagagaagcgatcatcatatgctccagaaacaggtgtgcgttatgatggggtttatagaattgagaagtgttggcgtaagaatggaatacagggctttaaagtttgcaggtatctctttgtcagatgcgacaacgagcctgctccatggacgagtgatgttcaaggggaccgtccgaggcctctgcctgtcatcaaggaattaaagaatgcaattgatataactgaaaggaaggggtccccttcctgggactatgaggatgaaaaaagttgctggatgtggaaaaagccacctccagccagtaaaaagagagttgctgatagtgtaggtccagaagatggcaaagtgattaggataatcaagcgacaaaaagcaaatatatctgttagagaaaaacttctgaaagagtttagttgtcaaatttgccggaaggtgatggccaatccaatcactaccccatgtgcccataatttctgcaaagcatgtcttgagggtgcctttgctggccaaagtctcactagacaaagaggtcaaggaagacggacattaagagcgcaaaagaatgttatgaaatgtccatcttgtactattgacatagctgactttcttcagaacccacaggtgaatcgggagttgatgggtgtcatagaatcactacaacaacaagctgagcaggaaaaactggacaacaattcagaagagtgtagtgaagagagtgatgccactgagcaacaacgagatttggttgctgatgaccaaattgccgaagagccaaaggatgaatcccaaaatgcacagaagcagaaaaaagaaactgatgatgatgacattatggatccatcatcaaatgtgcagacaatgagtccagggaaggagcaagaagccccaaccactaccactactgatagagccagtcaataa

SEQ ID NO: 2 - protein, 675 aa, Populus trichocarpa
MELPCDGAGICMVCKNKPPSEETLACKTCVTPWHATCLVSPPQALSDTLQWECPDCSMIHPPSTSAFASGRSEDSGDLIASIRKIEDDKSLTEQEKAKKRQELLNGAAAGPSSLDGEEKKEKNDVLDILDKELTCSFCMQMLDRPVTTPCGHNFCLKCFQRWIGQGKRTCAYCRVQIPPKIASQPRINSTLVIAIRMARMSRSSNAGGAAKVYHFVHNQNRPDKAYTTERAKKAGKANACSGKIFVTVAPDHFGPIPAENDPERNMGVLVGEIWEDRLACRQWGAHLPHVAGIAGQSTYGAQSVALSGGYIDDEDHGEWFLYTGSGGRDLSGNKRTNKDQSFDQKFDKMNEALRLSCLKGYPVRVVRSHKEKRSSYAPETGVRYDGVYRIEKCWRKNGIQGFKVCRYLFVRCDNEPAPWTSDVQGDRPRPLPVIKELKNAIDITERKGSPSWDYEDEKSCWMWKKPPPASKKRVADSVGPEDGKVIRIIKRQKANISVREKLLKEFSCQICRKVMANPITTPCAHNFCKACLEGAFAGQSLTRQRGQGRRTLRAQKNVMKCPSCTIDIADFLQNPQVNRELMGVIESLQQQAEQEKLDNNSEECSEESDATEQQRDLVADDQIAEEPKDESQNAQKQKKETDDDDIMDPSSNVQTMSPGKEQEAPTTTTTDRASQ

SEQ ID NO: 3 - DNA, 1950 bp, Arabidopsis lyrata
atggcgcgtgacatccaactcccctgcgacggcgacggtgtatgcatgcgatgcaaatccaaacctccgcctgaagaatctctcacttgcggcacgtgcgttacgccgtggcacgtgtcctgtctctcaaccccacccgaaaccctagcttccactctacagtggcattgtcctgattgctccggcgaaatcgatcctcttcctgtttccggcgacgtttctggttatggatctgttggttcagatcttgttgcagcgattcgcgcgattgaggctgatgagtcgttgagtactgaagagaaagctaagaagaggcaacagttattaagtggtaaaggcgtcgttgaggatgacgaagaagagaagaagagtaaagggaagaattcaaatctcgatgttttatctgctcttggagataacttgatgtgctctttctgtatgcaattgcctgagagacctgtgacgaaaccatgtgggcacaacgcttgcttgaaatgttttgagaagtggatggggcagggcaagcgaacttgtggtaaatgccgaagcgttattccggagaaaatggctaagaatccccgtatcaactcgtcccttgtgtctgctattagattagcgaaagtatctaaaagtgctgctgcgggtacttcaaaggtctttcatttcataagcaatcaagaccgaccagataaagcatttacaactgagcgtgcaaagaaaactgggaaggcaaacgctgctagtggaaggatttatgttacaataccaccagatcactttggtcctataccagctgaaaacgatcctgtcaggaaccaaggtcttttggttggagaatcctgggaagacagactcgagtgtaggcagtggggggctcatttccctcatgttgctggcattgctggacaatcaaattatggagctcaatctgtagcactctctggaggttatgaggatgatgaggatcatggagaatggtttctatacacaggaagtgggggaagagatctcagtggcaacaaaaggactaacaaggagcagtcctttgatcaaaaatttgaaaagtctaatgaagccttaagacttagctgcaaactggggtatcctgttcgagttgtcaggtctcacaaggagaagcgttctgcatatgcccctgaggagggagtgagatatgatggggtgtaccggatagagaagtgctggcggaaagttggaatacagggttctttcatggtctgtcgttacctgtttgttagatgtgataatgagccagctccatggactagtgatgagcatggagatcgtccaagacctttgcctaatattccagagctgaatatggccacagacctatttgagagaaaagaaagtccatcatgggattttgatgaagctgagggttcttggagatggatgaagccgccacctgctagtaaaaagtcagtgaatgttttggatcctgaggagaggaaaactttgaggaaagtcataaaggcagcacactcgaataccatgagggcaaaacttctgaaagaatttaagtgccagatttgtcggcaagtgctgactcttccagtgaccacgccgtgtgctcataacttctgcaaggcatgcttagaagccaagtttgctgggaaaacgctagtgagggagagaagcagaggtggacgaactctacgagcacagaagaatgtgatgaactgcccttgttgccccactgacatttctgattttctccagaaccctcaggtaaatagagaagtcatggaggtcatagagaggttgaagaatcaggaagtggacaatgccgagattgtagatgaaggcgaaggcgaaggttcaggtaccaacgctgaagaagaaactctggccgagtctgaagatgctgagcaaccaaagaaacggattaagttggacaccgacacagcagtttctgcgactgctgtgtaa

SEQ ID NO: 4 - protein, 649 aa, Arabidopsis lyrata
MARDIQLPCDGDGVCMRCKSKPPPEESLTCGTCVTPWHVSCLSTPPETLASTLQWHCPDCSGEIDPLPVSGDVSGYGSVGSDLVAAIRAIEADESLSTEEKAKKRQQLLSGKGVVEDDEEEKKSKGKNSNLDVLSALGDNLMCSFCMQLPERPVTKPCGHNACLKCFEKWMGQGKRTCGKCRSVIPEKMAKNPRINSSLVSAIRLAKVSKSAAAGTSKVFHFISNQDRPDKAFTTERAKKTGKANAASGRIYVTIPPDHFGPIPAENDPVRNQGLLVGESWEDRLECRQWGAHFPHVAGIAGQSNYGAQSVALSGGYEDDEDHGEWFLYTGSGGRDLSGNKRTNKEQSFDQKFEKSNEALRLSCKLGYPVRVVRSHKEKRSAYAPEEGVRYDGVYRIEKCWRKVGIQGSFMVCRYLFVRCDNEPAPWTSDEHGDRPRPLPNIPELNMATDLFERKESPSWDFDEAEGSWRWMKPPPASKKSVNVLDPEERKTLRKVIKAAHSNTMRAKLLKEFKCQICRQVLTLPVTTPCAHNFCKACLEAKFAGKTLVRERSRGGRTLRAQKNVMNCPCCPTDISDFLQNPQVNREVMEVIERLKNQEVDNAEIVDEGEGEGSGTNAEEETLAESEDAEQPKKRIKLDTDTAVSATAV

SEQ ID NO: 5 - DNA, 1971 bp, Arabidopsis lyrata
atgacgcgtgacacccaattcccgtgtgaccccgccggtgtttgcatgcgatgcaaatcgacgcctccgccggaggaatctctcacttgcggcacttgcgttacgccttggcacgtgtcctgcctttcttcacctcccaaaaccctcgaatctactttacagtggctttgtcctgattgctgcggtgaaaccgatgctcttcctgtttccggcgttgcgcccggatatggatctgttggttcagatcttgtagtggcgatccacgagattgaagcagatgactctctctctgctgaagagaaggctaagaagaggcaacagttactgagtggtaaagccgtcgtccatgaggatgacgaagaagagaagaagaggaagagtaaagggaaaaaacccgctgatgaggatgtgctatcgcacttccattgctcaatctgtatgcagttgctacagaaaccagtgtcgacaccatgtgggcacaacgcttgtttgaaatgtttcttgaagtggatgagacagggaaatcgcagttgtggaacatgccgcagcgtagttcctgaaagcatgataagcaatccccacatcaacttgtccattgtgtctgctattaggttggcaagattatctcagagggttgatgcgagtacttctaaagttgttcacgtcatcagtaatgaagaccgtccagataaagcatttacaaccgatcgagctaagaaactagggaatgcgaatgcttccagcggcaagatttttgtaacaatcccacgggatcactttggtcctataccagctgaacatgatcctgttaggaaccaaggtgttttggttggagaatcctggaagggccgacatacggctcggcagtggggggttcacttcccacttgtttctggcattgctggacaagctagttatggagctcaatctgttgtgctcgctggaggttatgaggatgatgaggatcatggagaatggtttctatacacaggaagtgggggaagagatctcagtactcgcaacttaaggactaacagcgttcagggttttgatcaaaaatttgaaaagtctaatgaagccttaagacttagctgcaaactggggtatcctgttcgagttgtcaggtcttccaaggacatgcattctgcatacgcccctgagggagaattactaaggtatgatggggtttaccgcatcgagaaatgttggatcaaagttggagtacagggttcttataaggtctgtcgtttcctgtttattagatgtgacaatgagccagctccatggaccagtgatgagcatggagatcgtccaagacctttgcctaatgttccggagcttaatatggccacaaacctatttgagagaaaagaaagtccatcatgggattttgatgaaggtgagggtcgttggcgatggatgaagccgccacctgctagtagaaaggcagttaataatgttaaggatcctgaggagaggaaatttttgaggaaagccatgacatcggcacggtcgaatacgatgagggcaagacttctgaaagaatttaagtgccagatctgccagcaagtgatgactaatcctgtgacaacaccttgtgctcataacttctgcaaggcttgtatagtatccaaatttgctgggaaaactctaatgagagagagaagcagaggtggacgaacactacgcgcacaaaagaatgtcatgaagtgcccttgttgcccaacagacattgctgaatttatccaaaaccctcaggtcaatagagaagtagcagaggtgatagagaagctgaagaaccaggaggaggaggacaacacagaacatgtagatgaaggtgaatgctcaggtaccagccatgaagaagaaactctgcccgtgtctggagatgctgagcaaccaaagaaacggattaagttggacattgacgcagcagtttctgcgactgtagtggaatctgacatgaagtaa

SEQ ID NO: 6 - protein, 656 aa, Arabidopsis lyrata
MTRDTQFPCDPAGVCMRCKSTPPPEESLTCGTCVTPWHVSCLSSPPKTLESTLQWLCPDCCGETDALPVSGVAPGYGSVGSDLVVAIHEIEADDSLSAEEKAKKRQQLLSGKAVVHEDDEEEKKRKSKGKKPADEDVLSHFHCSICMQLLQKPVSTPCGHNACLKCFLKWMRQGNRSCGTCRSVVPESMISNPHINLSIVSAIRLARLSQRVDASTSKVVHVISNEDRPDKAFTTDRAKKLGNANASSGKIFVTIPRDHFGPIPAEHDPVRNQGVLVGESWKGRHTARQWGVHFPLVSGIAGQASYGAQSVVLAGGYEDDEDHGEWFLYTGSGGRDLSTRNLRTNSVQGFDQKFEKSNEALRLSCKLGYPVRVVRSSKDMHSAYAPEGELLRYDGVYRIEKCWIKVGVQGSYKVCRFLFIRCDNEPAPWTSDEHGDRPRPLPNVPELNMATNLFERKESPSWDFDEGEGRWRWMKPPPASRKAVNNVKDPEERKFLRKAMTSARSNTMRARLLKEFKCQICQQVMTNPVTTPCAHNFCKACIVSKFAGKTLMRERSRGGRTLRAQKNVMKCPCCPTDIAEFIQNPQVNREVAEVIEKLKNQEEEDNTEHVDEGECSGTSHEEETLPVSGDAEQPKKRIKLDIDAAVSATVVESDMK

SEQ ID NO: 7 - DNA, 1857 bp, Arabidopsis lyrata
atggcgcctgaagttcagtttccttgcgacggagacggcgtatgtatgcggtgccaggtaaaacctccgtcagaagagactctcacgtgtggcacgtgcgtcactccctggcacgtgtcctgtctccttcctgaatcactctcttcttccactggagagtggcagtgtcccgattgctccggcgatgtcgtttcctccgccgttccagttaccggaaacgtcggatttgaatcatccggttcagttctcgtagcagcgatccgtgcgattcaggctgatctgactttgacggaagctgagaaagccaaaaggaggcagaagctcatgagtggtggtggtgacgatcgtctcgttgaagaagacaagaagaagttagaaatcttttgttctatttgcattcaattgccagaaagacctatcacgacaccgtgtgggcacaacttctgcttgagatgtttcgagaaatgggtaggtcaagggaagctaacttgtatgacatgccgaaccaaaattcccaaaaatgttgcgcgaaatcctcgcatcaacttagctctagtctctgctattcgtttagcaagtgttaccaaatgttctgttgaggcagctgcggccaaggttcatcatattatccgcaaccaagaccgtcctgagaaagcctttactaccgagcgggctaaaaagactgggaaagctaatgctgctagcggaaggatttatgttacaatacctggtgatcattttggtcccataccagctgaaaatgatcccactagaaaccaaggtgttttggttggagaatcttgggaggacaggcaagattgtaggcagtggggagctcatttcccgcatattgctggcattgccgggcaatcagcggttggagctcagtctgtggcgctctctggaggttatgatgatgatgaggatcatggtgaatggtttctctacacaggaagtggtggaagggatctcggaggaaacaaaagaactaacaagatacagtcttctgaccagtcgtttgcaaaaatgaatgaagctctaagacttagttgcaaaatgggctatcctgtccgagttgtcaggtctcacaaggagaagcgttctgcatatgcccctaaggaaggagtgagatacgatggggtctaccgaatcgagaagtgctggagcaacgttggaatacagggttcttataaggtctgtcgttacctatttgttagatgtgacaatgagccagctccatggaccagtgatgagcatggcgatcgtccaagacctttgcctaatattccagagcttaagaaagctactgacctgtttgtgagaaaggagagtccgtcatgggatttcgatgaagctgagggtcgttggaaatggatgaagtctccacctgttagcagaaaggctgttgctgctttggatcctgaggagaggaagatcattaggaaagcaaaaaacggaaataacagacttctcaaagaattcggttgccaaatctgtcggaaagtgctgagttttccagtgacgacgccttgtgctcacaacttctgcaaagcatgcctggaagctaaatttgctggggtctctcaagtgagagagagaagcagaggcgggcgcacactacgtgcaaagaagaacataatgacctgtccgtgctgcactaccgacctctccgactttcttcaaaacccgcaggtgaatagagaaatgatggaagttatcgaaaatctgaagaagaaagaggaagaggctgaatcaagcaaagacactgcagatgtgtctgaagttgaaccaccagcgaagaggatcaaattggttgatacagttgcagcagcagccactgactgtgttggaaagtaa

SEQ ID NO: 8 - protein, 618 aa, Arabidopsis lyrata
MAPEVQFPCDGDGVCMRCQVKPPSEETLTCGTCVTPWHVSCLLPESLSSSTGEWQCPDCSGDVVSSAVPVTGNVGFESSGSVLVAAIRAIQADLTLTEAEKAKRRQKLMSGGGDDRLVEEDKKKLEIFCSICIQLPERPITTPCGHNFCLRCFEKWVGQGKLTCMTCRTKIPKNVARNPRINLALVSAIRLASVTKCSVEAAAAKVHHIIRNQDRPEKAFTTERAKKTGKANAASGRIYVTIPGDHFGPIPAENDPTRNQGVLVGESWEDRQDCRQWGAHFPHIAGIAGQSAVGAQSVALSGGYDDDEDHGEWFLYTGSGGRDLGGNKRTNKIQSSDQSFAKMNEALRLSCKMGYPVRVVRSHKEKRSAYAPKEGVRYDGVYRIEKCWSNVGIQGSYKVCRYLFVRCDNEPAPWTSDEHGDRPRPLPNIPELKKATDLFVRKESPSWDFDEAEGRWKWMKSPPVSRKAVAALDPEERKIIRKAKNGNNRLLKEFGCQICRKVLSFPVTTPCAHNFCKACLEAKFAGVSQVRERSRGGRTLRAKKNIMTCPCCTTDLSDFLQNPQVNREMMEVIENLKKKEEEAESSKDTADVSEVEPPAKRIKLVDTVAAAATDCVGK

SEQ ID NO: 9 - DNA, 1869 bp, Arabidopsis lyrata
atggcgcctgaagttcagtttccttgcgacggagacggtgtatgtatgcggtgccaggggaaacctccggcagaagagactctcacgtgtggcacgtgcgtcacgccttggcacgtgtcgtgtctccttccagaatcactctcttcttccactggagagtggcagtgtcccgattgctctggcgatgtcgttccctccgccgttccggttaccggaaacgctaacgctggacttgaaacatccggttcagttctcgtagcagcgatccgtgcgattcaggctgatgtgaatttgacggaagctgagaaagccaaaaggaggcagaaactgatgagtggtggtggtgacgatcgtctcgatgaagaagacaaaaagaagttagagatcttttgttctatttgcattcaattgccagaaagacctatcacgacaccgtgtgggcacaacttctgcttgagatgtttcgagaaatgggtaggtcaagggaagctaacttgtatgacatgccgaaccaaaattccgaaaaatgttgcgcgaaatcctcgcatcaacttagctctagtctctgctattcgtttagcaagtgttaccaaatgttctgttgatgcaactgcggccaaggttcatcatattatccgcaaccaagaccgtcctgagaaagcctttactaccgagcgggctaaaaagactgggaaagctaatgctgctagcggaaggatttatgtcacagtacctggtgatcattttggtcccataccagctgaaaatgatcccactaggaatcaaggtgttttggttggagaatcttgggaggacaggcaagaatgtaggcagtggggagctcatttcccgcatgttgctggcatttccgggcaatcagcggttggagctcagtctgtggcgctctctggaggttatgatgatgatgaggatcatggtgaatggtttctctacacaggaagtggtggaagggatctcggaggaaacaaaagaactaacaagatacagtcttctgaccagtcgtttgcaaaaatgaatgaagctctaagacttagttgcaaaatgggctatcctgtccgagttgtcaggtctcacaaggagaagcgttctgcatatgcccctaaggaaggagtgagatacgatggggtctaccgaatcgagaagtgctggagcaacgttggaatacagggttcttataaggtctgtcgttacctgtttgttagatgtgacaatgagccagctccatggaccagtgatgagcatggcgatcgtccaagacctttgcctaatattccagagcttaagaaagctactgacctgtttgtgagaatggagagtccatcatgggatttcgatgaagctgagggtcgttggaaatggatgaagtctccacctgttagcagaaaggctgttgctgctttggatcctgaggagaggaagatcattaggaaagcaaaaaacggaaataacagacttctcaaagaattcggctgccaaatctgtcggaaagtgctgagttttccagtgacgaccccttgtgctcacaacttctgcaaagcatgcctggaagctaaatttgctggggtctctcaagtgagagagagaagcagaggcgggcgcacactacgtgcaaagaagaacataatgacctgtccgtgctgcactaccgacctctccgactttcttcaaaacccgcaggtgaatagagaaatgatggaagttatcgaaaatctgaagaagaaagaggaagaggctgaatcaagcaaagacactgcagagtcttctggaggaaacaacaccgagtctgaagaagaagaaactcagactgtgtctgaagttgaaccaccaacgaagaggatcaaattgtag

SEQ ID NO: 10 - protein, 622 aa, Arabidopsis lyrata
MAPEVQFPCDGDGVCMRCQGKPPAEETLTCGTCVTPWHVSCLLPESLSSSTGEWQCPDCSGDVVPSAVPVTGNANAGLETSGSVLVAAIRAIQADVNLTEAEKAKRRQKLMSGGGDDRLDEEDKKKLEIFCSICIQLPERPITTPCGHNFCLRCFEKWVGQGKLTCMTCRTKIPKNVARNPRINLALVSAIRLASVTKCSVDATAAKVHHIIRNQDRPEKAFTTERAKKTGKANAASGRIYVTVPGDHFGPIPAENDPTRNQGVLVGESWEDRQECRQWGAHFPHVAGISGQSAVGAQSVALSGGYDDDEDHGEWFLYTGSGGRDLGGNKRTNKIQSSDQSFAKMNEALRLSCKMGYPVRVVRSHKEKRSAYAPKEGVRYDGVYRIEKCWSNVGIQGSYKVCRYLFVRCDNEPAPWTSDEHGDRPRPLPNIPELKKATDLFVRMESPSWDFDEAEGRWKWMKSPPVSRKAVAALDPEERKIIRKAKNGNNRLLKEFGCQICRKVLSFPVTTPCAHNFCKACLEAKFAGVSQVRERSRGGRTLRAKKNIMTCPCCTTDLSDFLQNPQVNREMMEVIENLKKKEEEAESSKDTAESSGGNNTESEEEETQTVSEVEPPTKRIKL

SEQ ID NO: 11 - DNA, 1983 bp, Arabidopsis thaliana
atgacgcctgccacccagtacccatgcgaccccgaaggtgtatgcatgcgatgcaaatcgatgcctccaccggaggaatctctcacttgcggcacgtgcgtcacgccttggcacgtgtcctgccttttgtccccgcccgaaaccctaagtgctactttacagtggctttgtcctgattgctccggtgaaaccaatcctcttcctgtttccggtgttgcggctggatatggatctgttggttcagatcttgtagcggcgatccactcgattgaggcggatgaaactctctctgctgaagagaaggctaagaagaagcagcagttactgagtggtaagggggtcgtcgatgaggatgacgaagaagagaagaagaagacgagtaaaggaaagaaacccatcgatgtgctatctcacttcgagtgttctttctgcatgcagtcgctacaaaaacccgtctcggttcgtgtactctttgctttggctcttatgcttgtgtggtttctcgaatctacaccatgtgggcacaacgcttgcttgaaatgtttcttgaagtggatggggcagggacaccgcagttgtggaacatgccgcagcgtaattcctgaaagcatggttaccaatccccgtatcaacttgtccattgtgtctgctattaggttagcaagagtatccgaaaaggctgatgcgcgtacttcaaaagttgttcactatgttgacaatgaagatcgtccagataaagcatttacaactgagcgcgctaagaaaacagggaatgcaaatgcttccagtggcaagatttttgttacaatccctcgagatcattttggtcctataccagctgaaaatgatcctgttaggaaccaaggtcttttggttggagaatcctggaagggccgacttgcttgtcggcagtggggggctcacttcccacatgtttccggcattgctggacaagcgagttatggagctcaatctgttgtgctcgctggaggttatgatgatgatgaggatcatggagaatggtttctatacacaggaagtgggggaagaattctcaaaggcaacaaaaggactaacacggttcaagcttttgatcaagtatttctaaactttaatgaagctttaagacttagttgtaaactagggtatcctgttcgagttgtcaggtctaccaaggacaagcgttctccatacgcccctcaaggaggactactaaggtatgatggtgtttaccggatagagaaatgctggaggatagttggaatacagatgtgccgtttcctgtttgttagatgtgacaatgagccagctccatggaccagtgatgagcatggagatcgcccaagacctttgcctaatgttcctgagcttaatatggccacagacctgtttgagagaaaagaaagtccatcatgggattttgatgaaggtgaggatcgttggagatggatgaagccaccacctgctagtaaaaaggcagttaaaaatgttttggatcctgaggagaggaaacttttgagggaagccataaagtcggcaaacccgaataccatgagggcaagacttttgaaagaatttaagtgccagatctgtcagaaagtgatgactaatcctgtgacaacgccttgtgctcataacttctgcaaggcttgtttggaatcgaagtttgctgggacagctctagtgagagagagaggcagcggtggacgaaaattacgttcacaaaagagtgtcatgaagtgcccttgttgcccaacggacattgccgagtttgtccagaaccctcaggtcaatagagaagtagcggaggtgatagagaagctgaagaaacaggaagaggaggaaaacgcaaagtctttagatgaaggtcaatgctcaggtaccagccatgaagaagaagatgatgagcaaccaaagaaacggattaagttggacactgacgcagaagtttctgcgactgttgtggaatctgacatgaagtaa

SEQ ID NO: 12 - protein, 660 aa, Arabidopsis thaliana
MTPATQYPCDPEGVCMRCKSMPPPEESLTCGTCVTPWHVSCLLSPPETLSATLQWLCPDCSGETNPLPVSGVAAGYGSVGSDLVAAIHSIEADETLSAEEKAKKKQQLLSGKGVVDEDDEEEKKKTSKGKKPIDVLSHFECSFCMQSLQKPVSVRVLFALALMLVWFLESTPCGHNACLKCFLKWMGQGHRSCGTCRSVIPESMVTNPRINLSIVSAIRLARVSEKADARTSKVVHYVDNEDRPDKAFTTERAKKTGNANASSGKIFVTIPRDHFGPIPAENDPVRNQGLLVGESWKGRLACRQWGAHFPHVSGIAGQASYGAQSVVLAGGYDDDEDHGEWFLYTGSGGRILKGNKRTNTVQAFDQVFLNFNEALRLSCKLGYPVRVVRSTKDKRSPYAPQGGLLRYDGVYRIEKCWRIVGIQMCRFLFVRCDNEPAPWTSDEHGDRPRPLPNVPELNMATDLFERKESPSWDFDEGEDRWRWMKPPPASKKAVKNVLDPEERKLLREAIKSANPNTMRARLLKEFKCQICQKVMTNPVTTPCAHNFCKACLESKFAGTALVRERGSGGRKLRSQKSVMKCPCCPTDIAEFVQNPQVNREVAEVIEKLKKQEEEENAKSLDEGQCSGTSHEEEDDEQPKKRIKLDTDAEVSATVVESDMK

SEQ ID NO: 13 - DNA, 1938 bp, Arabidopsis thaliana
atggcgcgtgacatccaactcccctgcgacggcgacggcgtatgcatgcgatgcaaatccaaccctccgcctgaagaatctctcacttgcggcacgtgcgttacaccgtggcacgtgtcctgtctctcttcacctcccaaaaccctagcttccactctacagtggcattgtcctgattgctccggcgaaatcgatcctcttcctgtttccggcggtgctactggtttcgaatctgctgggtcagatcttgtagctgcgattcgtgcgattgaggctgatgagtcgttgagtactgaagagaaagctaagatgaggcaacggttactgagtggtaaaggtgttgaggaggatgatgaagaagagaagaggaagaagaaggggaaagggaagaatccgaatctggatgtgttatctgctcttggagataacttgatgtgttctttctgtatgcagttgcctgagagacctgtgacgaaaccatgtgggcacaacgcttgcttaaaatgttttgagaaatggatggggcagggaaagagaacttgtggtaaatgccgcagcataattcctgaaaaaatggctaagaatccccgtatcaactcgtctcttgttgctgccattcgattagcaaaagtctctaaaagtgctgctgcgaccacttcaaaggtctttcatttcatcagcaaccaagaccgaccagataaagcatttacaaccgagcgtgcaaagaaaactggcaaggcaaacgctgctagtggaaagatttatgttacaataccaccagatcattttggtcctattccagctgaaaatgaccctgtcaggaaccaaggtcttttggttggagaatcctgggaggacagactcgagtgtaggcagtggggtgctcatttcccacatgttgctggcattgctggacaatctacttatggcgctcaatctgtagcactctctggaggttataaggatgatgaggatcatggagaatggtttctatacacaggaagtgggggtagagatctcagtggcaacaaaaggactaacaaggagcagtcttttgaccaaaagtttgagaagtctaatgcagcattaaaactcagctgcaaattggggtatcctgttcgagttgtcaggtctcacaaggagaagcgttctgcatacgcccctgaggaaggagtgagatatgatggggtttacaggattgagaagtgctggcgcaaagttggagtacagggttcttttaaggtctgtcgttacctgttcgttagatgtgacaatgagccagctccatggaccagtgatgagaatggagatcgtccaagacctatccctaatattccagagcttaatatggccaccgacctgtttgagagaaaagaaactccatcatgggattttgatgaaggtgagggttgttggaaatggatgaagccgccacctgcaagtaaaaagtcagtgaatgttttggctcctgaggagaggaaaaatttgaggaaagccataaaggcggcacactcgaataccatgagggcaagacttctgaaagaatttaagtgccagatctgtcagcaagtgttgactcttcctgtgacaacaccctgtgctcataacttctgcaaggcttgcttagaagcgaaatttgctgggaaaactcttgtgagagagagaagcacaggtggacggacactacgctcaaggaagaatgtcctgaactgcccttgttgcccaacagacatatctgattttctgcagaaccctcaggtcaacagagaagtagcggaggtgatagagaagctaaagacccaggaagaggacaccgcagagcttgaagatgaagatgaaggtgaatgctcaggcaccacccctgaagaagattctgagcaaccgaagaaaaggatcaagttggacactgacgcaacagtttctgcgaccatcaggtga

SEQ ID NO: 14 - protein, 645 aa, Arabidopsis thaliana
MARDIQLPCDGDGVCMRCKSNPPPEESLTCGTCVTPWHVSCLSSPPKTLASTLQWHCPDCSGEIDPLPVSGGATGFESAGSDLVAAIRAIEADESLSTEEKAKMRQRLLSGKGVEEDDEEEKRKKKGKGKNPNLDVLSALGDNLMCSFCMQLPERPVTKPCGHNACLKCFEKWMGQGKRTCGKCRSIIPEKMAKNPRINSSLVAAIRLAKVSKSAAATTSKVFHFISNQDRPDKAFTTERAKKTGKANAASGKIYVTIPPDHFGPIPAENDPVRNQGLLVGESWEDRLECRQWGAHFPHVAGIAGQSTYGAQSVALSGGYKDDEDHGEWFLYTGSGGRDLSGNKRTNKEQSFDQKFEKSNAALKLSCKLGYPVRVVRSHKEKRSAYAPEEGVRYDGVYRIEKCWRKVGVQGSFKVCRYLFVRCDNEPAPWTSDENGDRPRPIPNIPELNMATDLFERKETPSWDFDEGEGCWKWMKPPPASKKSVNVLAPEERKNLRKAIKAAHSNTMRARLLKEFKCQICQQVLTLPVTTPCAHNFCKACLEAKFAGKTLVRERSTGGRTLRSRKNVLNCPCCPTDISDFLQNPQVNREVAEVIEKLKTQEEDTAELEDEDEGECSGTTPEEDSEQPKKRIKLDTDATVSATIR

SEQ ID NO: 15 - DNA, 1869 bp, Arabidopsis thaliana
atggcgattcaaactcagcttccttgcgacggagacggtgtatgtatgcggtgccaggtgacacctccgtcagaagagactctcacgtgtggcacctgtgtcactccatggcacgtgtcgtgtctccttcctgaatcactcgcttcttccactggagattgggagtgtcccgattgctccggcgttgtcgttccctccgccgctccgggtaccggaatctccggacctgaatcttccggttcagttctcgttgctgcgatccgtgcgattcaggctgatgtgactttgaccgaagctgagaaagccaaaaagaggcagagactgatgagtggtggtggtgacgatggtgtcgatgatgaagaaaagaagaagttagaaatcttttgttctatttgcattcaattgccagagagacctgtcacgacaccgtgtgggcacaatttctgtttgaaatgtttcgagaaatgggcagtaggtcaagggaagctaacttgtatgatatgccgaagcaaaattccgagacatgtggcgaaaaatcctcgcatcaacttagctctagtttctgctattcgtttagcaaatgttaccaaatgttctggtgaggcaactgcggccaaggttcatcatattatccgcaaccaagaccgtcctgacaaagcatttactaccgagcgggcagtaaaaactgggaaagctaatgctgctagcggtaagttttttgtgacaatacctcgtgatcattttggtcccataccagctgcgaatgatgtcactagaaaccaaggtgttttggttggagaatcttgggaggacaggcaagagtgtaggcagtggggagttcatttcccgcatgttgctggcattgccgggcaagcagcggttggagctcagtctgtggccctctctggaggttatgacgatgatgaggatcatggtgaatggtttctctacacaggaagtggtggaagggatctcagtggaaacaaaagagttaacaagatacagtcttctgaccaggcgtttaaaaacatgaatgaagctctaagacttagttgcaaaatgggctatcctgtccgagttgtaaggtcttggaaggagaagcgttctgcatatgcccctgcggaaggagtgagatacgatggggtctacagaattgaaaagtgctggagtaatgttggcgtacagggtttgcataagatgtgtcgttacctgtttgttagatgtgacaatgagccagctccatggaccagtgatgagcatggcgatcgtccaagacctttgcctgatgttccagagctggagaatgctactgacctgtttgtgagaaaggagagtccatcatggggtttcgatgaagctgagggtcgttggaagtggatgaagtctccacctgttagcagaatggctttggatactgaggagaggaagaagaataagagagcaaaaaaaggaaataatgctatgaaggccagacttctgaaagaattcagttgccaaatctgtcggaaagtgctgagtcttccagtgacgacaccttgtgcacacaacttctgcaaagcatgcttagaagcgaagtttgctgggataactcaactgagagacagaagcaatggcgtgcgtaaactacgtgcaaagaaaaacatcatgacctgcccttgctgcacaaccgatctctccgagtttctccaaaacccgcaggtgaacagagaaatgatggagataatagagaattttaagaagagtgaggaagaggctgaagttgcggagtcatcaaacatttctgaagaagaagaagaagaatccgaacctccaactaagaagattaagatggataacaactctgttggtgatacaagtctctcagcttaa

SEQ ID NO: 16 - protein, 622 aa, Arabidopsis thaliana
MAIQTQLPCDGDGVCMRCQVTPPSEETLTCGTCVTPWHVSCLLPESLASSTGDWECPDCSGVVVPSAAPGTGISGPESSGSVLVAAIRAIQADVTLTEAEKAKKRQRLMSGGGDDGVDDEEKKKLEIFCSICIQLPERPVTTPCGHNFCLKCFEKWAVGQGKLTCMICRSKIPRHVAKNPRINLALVSAIRLANVTKCSGEATAAKVHHIIRNQDRPDKAFTTERAVKTGKANAASGKFFVTIPRDHFGPIPAANDVTRNQGVLVGESWEDRQECRQWGVHFPHVAGIAGQAAVGAQSVALSGGYDDDEDHGEWFLYTGSGGRDLSGNKRVNKIQSSDQAFKNMNEALRLSCKMGYPVRVVRSWKEKRSAYAPAEGVRYDGVYRIEKCWSNVGVQGLHKMCRYLFVRCDNEPAPWTSDEHGDRPRPLPDVPELENATDLFVRKESPSWGFDEAEGRWKWMKSPPVSRMALDTEERKKNKRAKKGNNAMKARLLKEFSCQICRKVLSLPVTTPCAHNFCKACLEAKFAGITQLRDRSNGVRKLRAKKNIMTCPCCTTDLSEFLQNPQVNREMMEIIENFKKSEEEAEVAESSNISEEEEEESEPPTKKIKMDNNSVGDTSLSA

SEQ ID NO: 17 - DNA, 1872 bp, Arabidopsis thaliana
atggcgattcaaactcagcttccttgcgacggagacggtgtatgtatgcggtgccaggtgaatcctccgtcagaagagactctcacgtgtggcacctgtgtcactccatggcacgtgtcgtgtctccttcctgaatcactcgcttcttccactggagactgggagtgtcccgattgctccggcgttgttgttccctccgccgctccgggtaccggaatctccggacctgaatcttccggttcagttctcgttactgcgatccgtgcgattcaggctgatgtgactttgaccgaagctgagaaagccaaaaagaggcagagactgatgagtggtggtggtgacgatggtgtcgatgatgaagaaaagaagaagttagaaatcttttgttctatttgcattcaattgccagagagacctgttacgacaccgtgtgggcacaatttctgtttgaaatgtttcgagaaatgggcagtaggtcaagggaagctaacttgtatgatatgccgaagcaaaattccgagacatgtggcgaaaaatcctcgcatcaacttagctctagtttctgctattcgtttagcaaatgttaccaaatgttctggtgaggcaactgcggccaaggttcatcatattatccgcaaccaagaccgtcctgacaaagcatttactaccgagcgggcagtaaaaactgggaaagctaatgctgctagcggtaagttttttgtgacaatacctcgtgatcattttggtcccataccagctgcgaatgatgtcactagaaaccaaggtgttttggttggagaatcttgggaggacaggcaagagtgtaggcagtggggagttcatttcccgcatgttgctggcattgccgggcaagcagcggttggagctcagtctgtggccctctctggaggttatgacgatgatgaggatcatggtgaatggtttctctacacaggaagtggtggaagggatctcagtggaaacaaaagagttaacaagatacagtcttctgaccaggcgtttaaaaacatgaatgaagctctaagacttagttgcaaaatgggctatcctgtccgagttgtaaggtcttggaaggagaagcgttctgcatatgcccctgcggaaggagtgagatacgatggggtctacagaattgaaaagtgctggagtaatgttggcgtacagggtttgcataagatgtgtcgttacctgtttgttagatgtgacaatgagccagctccatggaccagtgatgagcatggcgatcgtccaagacctttgcctgatgttccagagctggagaatgctactgacctgtttgtgagaaaggagagtccatcatggggtttcgatgaagctgagggtcgttggaagtggatgaagtctccacctgttagcagaatggctttggatactgaggagaggaagaagaataagagagcaaaaaaaggaaataatgctatgaaggccagacttctgaaagaattcagttgccaaatctgtcggaaagtgctgagtcttccagtgacgacaccttgtgcacacaacttctgcaaagcatgcttagaagcgaagtttgctgggataactcaactgagagacagaagcaatggcgtgcgtaaactacgtgcaaagaaaaacatcatgacctgcccttgctgcacaaccgatctctccgagtttctccaaaacccgcaggtgaacagagagatgatggagataatagagaattttaagaagagtgaggaagaggctgaagttgcggagtcatcaaacatttctgaagaagaaggagaagaagaatccgaacctccaactaagaagattaagatggataaaaactctgttggtggtacaagtctctcagcttaa

SEQ ID NO: 18 - protein, 623 aa, Arabidopsis thaliana
MAIQTQLPCDGDGVCMRCQVNPPSEETLTCGTCVTPWHVSCLLPESLASSTGDWECPDCSGVVVPSAAPGTGISGPESSGSVLVTAIRAIQADVTLTEAEKAKKRQRLMSGGGDDGVDDEEKKKLEIFCSICIQLPERPVTTPCGHNFCLKCFEKWAVGQGKLTCMICRSKIPRHVAKNPRINLALVSAIRLANVTKCSGEATAAKVHHIIRNQDRPDKAFTTERAVKTGKANAASGKFFVTIPRDHFGPIPAANDVTRNQGVLVGESWEDRQECRQWGVHFPHVAGIAGQAAVGAQSVALSGGYDDDEDHGEWFLYTGSGGRDLSGNKRVNKIQSSDQAFKNMNEALRLSCKMGYPVRVVRSWKEKRSAYAPAEGVRYDGVYRIEKCWSNVGVQGLHKMCRYLFVRCDNEPAPWTSDEHGDRPRPLPDVPELENATDLFVRKESPSWGFDEAEGRWKWMKSPPVSRMALDTEERKKNKRAKKGNNAMKARLLKEFSCQICRKVLSLPVTTPCAHNFCKACLEAKFAGITQLRDRSNGVRKLRAKKNIMTCPCCTTDLSEFLQNPQVNREMMEIIENFKKSEEEAEVAESSNISEEEGEEESEPPTKKIKMDKNSVGGTSLSA

SEQ ID NO: 19 - DNA, 1854 bp, Arabidopsis thaliana
atggcgattgaaactcagcttccttgcgacggtgacggtgtgtgtatgcggtgtcaggtgaatcctccgtcagaagagactctcacttgtggcacgtgcgtcactccatggcacgtgccgtgtctcctccccgaatcactcgcttcttccactggagagtgggagtgtcccgattgctccggcgttgtcgttccctccgccgctccgggtaccggaaacgctcgacctgaatcttccggttcagttctcgttgctgcgatccgtgcgattcaggctgatgagactttaaccgaagctgagaaagccaaaaaaaggcagaaactgatgagtgggggtggtgacgatggtgtcgatgaagaagagaagaagaagttagaaatcttttgttctatttgcattcaattgccagaaagacctatcacgacaccgtgtgggcacaatttctgtttgaaatgtttcgagaaatgggcagtaggtcaagggaagctaacttgtatgatatgccgaagcaaaattccgagacatgtggcaaaaaatcctcgcatcaacttagctctagtttctgctattcgtttagcaaatgttaccaaatgttctgttgaggcaactgcagccaaggttcatcatattatccgcaaccaagaccgtcctgagaaagcatttactaccgagcgggcagtaaaaactgggaaagctaatgctgctagcggtaagttttttgtgacaatacctcgtgatcattttggtcccataccagctgagaatgatgtcactagaaagcaaggtgttttggttggagaatcttgggaggacaggcaagagtgtaggcagtggggagctcatttcccgcatattgctggcattgccgggcaatcagcggttggagctcagtctgtggccctctctggaggttatgacgatgatgaggatcatggtgaatggtttctctacacaggaagtggtggaagggatctcagtggaaacaaaagaattaacaagaaacagtcgtctgaccaggcgtttaaaaacatgaatgaatctctaagacttagttgcaaaatgggctatcctgtccgagttgtcaggtcttggaaggagaagcgttctgcatatgcccctgctgaaggtgtgagatatgatggggtctatcgaattgagaagtgctggagtaatgttggagtacagggttcttttaaggtctgtcgttacctgtttgttagatgtgacaatgagccagctccatggaccagtgatgagcatggcgatcgtccaagaccgttgcctaatgttccggagcttgagactgctgctgacctgtttgtgagaaaggagagtccatcatgggatttcgatgaagctgagggtcgttggaaatggatgaagtctcctcctgttagcagaatggctttggatcctgaggagaggaagaagaataagagagcaaaaaatactatgaaggccagacttctgaaagaatttagttgccaaatctgtcgggaagtgctgagtcttccagtgacgacgccttgtgcacacaacttctgcaaagcatgcttagaagcgaagtttgctgggataactcaactgagagagagaagcaatggcggacgtaaactacgtgcaaagaagaacatcatgacctgcccttgctgcacgacggatctctccgagtttctccaaaacccgcaggtgaacagagagatgatggagataatagagaattttaagaagagtgaggaagaggctgatgcatccatttctgaagaagaagaagaagaatccgaacctccaactaagaagattaagatggataacaactctgttggtggtagtggtacaagtctctcagcttaa

SEQ ID NO: 20 - protein, 617 aa, Arabidopsis thaliana
MAIETQLPCDGDGVCMRCQVNPPSEETLTCGTCVTPWHVPCLLPESLASSTGEWECPDCSGVVVPSAAPGTGNARPESSGSVLVAAIRAIQADETLTEAEKAKKRQKLMSGGGDDGVDEEEKKKLEIFCSICIQLPERPITTPCGHNFCLKCFEKWAVGQGKLTCMICRSKIPRHVAKNPRINLALVSAIRLANVTKCSVEATAAKVHHIIRNQDRPEKAFTTERAVKTGKANAASGKFFVTIPRDHFGPIPAENDVTRKQGVLVGESWEDRQECRQWGAHFPHIAGIAGQSAVGAQSVALSGGYDDDEDHGEWFLYTGSGGRDLSGNKRINKKQSSDQAFKNMNESLRLSCKMGYPVRVVRSWKEKRSAYAPAEGVRYDGVYRIEKCWSNVGVQGSFKVCRYLFVRCDNEPAPWTSDEHGDRPRPLPNVPELETAADLFVRKESPSWDFDEAEGRWKWMKSPPVSRMALDPEERKKNKRAKNTMKARLLKEFSCQICREVLSLPVTTPCAHNFCKACLEAKFAGITQLRERSNGGRKLRAKKNIMTCPCCTTDLSEFLQNPQVNREMMEIIENFKKSEEEADASISEEEEEESEPPTKKIKMDNNSVGGSGTSLSA

SEQ ID NO: 21 - DNA, 1815 bp, Glycine max
atggcgcagcttccctgcgactccgatggcgtctgcatgctctgcaaacagaaacccagtccctcccaaaccctctcctgtagaacatgtgctactccctggcacctttcgtgtctcccttcggcccctctctccctctccgactcacattgggactgccccgactgttccgacacctccaaccattaccccgtcgctcccaccgccgaccttgtctccgccgttcatgccattcaggccgacacctctctcactgaccaggagaaggcaaagaaacgtcaagaactcctcgctggctcttccgactcctcaaaggacaaagccaaaaccaaagacatttttgacggaagcttaaattgctccatatgcatgcagttaccggagaggcccgtcacgacaccttgtgggcacaacttgtgtttgagatgtttcgagaagtgggtcggacaggggaagcgcacctgtgccaattgccgtgctcaaatcccggcgaagatggcgagtcagccgaggatcaactctcagctggcaatggccatccgattggcgaaggcggccaagtcgggagaagggtcctcgggcccacccaaggtgtaccactttgtccgcaaccaggaccgccccgataccgcattcaccacagagcgagccaagaagactgggaaagccaatgcttgcagtggtaagatttttgtgactgttcctcctgaccattttggtcccatcccgtctgaaaacgaccccatcaggaaccgcggtgttcttgttggtgacacgtgggaggacaggatggagtgtcgccagtggggtgctcatttgcctcatgttgccggcattgctggacagagtggctatggttcccagtctgttgccctttctggtggttacgaggatgacgaggatcacggtgagtggttcctttacactggcagtggtggcagagatctcagtggtaacaaacgaaccaacaagcttcaatcctttgaccagaagtttgaaaacatgaacgaggccttgagagtcagctgcaggaagggttatcccgttcgggttgtaaggtcgcacaaggaaaagcgttcttcttatgcaccggagtctggagtgcgttacgatggagtttatagaatagagaaatgctggcgcaaaaatggaacacaaggttgcaaggtttgtaggtatttgtttgtgagatgtgacaatgagccagcaccctggacaagtgatgaaattggagatcgcccacgcccactgcctaaaattgatgagttgaagggtgcggttgatataactgaaaggaagggtgatccatcgtgggattttgatgaggaaaaggggtcctggttgtggaagaagcctccaccagaaagcaagaaatcagtggacattaaagctgaagatggaacaacaatcagagttaaacggaaagcaaaaaatgtgtccgtgaaagaaaggctattgaaagagtttggttgccaaatatgtcgcaaggcgatggcttcccctcttactacaccttgtgctcacaacttctgcaaagcctgtttggagggtgccttttctggccaaagtttcatcagaaatagggcatgtggaggtggacgcactttacgagcgcagaagaattttatgaaatgcccatcatgttcaactgacattgctgactttctccagaatccacaggttaatagagaaatgctggctgttatagaatcactacaacgccaggctgaagatgaaaattctgaagagtcaagtgataaaaatgatgaaaatctgcatgacccaactgagccacacaagcgaaggaaagagtga

SEQ ID NO: 22 - protein, 604 aa, Glycine max
MAQLPCDSDGVCMLCKQKPSPSQTLSCRTCATPWHLSCLPSAPLSLSDSHWDCPDCSDTSNHYPVAPTADLVSAVHAIQADTSLTDQEKAKKRQELLAGSSDSSKDKAKTKDIFDGSLNCSICMQLPERPVTTPCGHNLCLRCFEKWVGQGKRTCANCRAQIPAKMASQPRINSQLAMAIRLAKAAKSGEGSSGPPKVYHFVRNQDRPDTAFTTERAKKTGKANACSGKIFVTVPPDHFGPIPSENDPIRNRGVLVGDTWEDRMECRQWGAHLPHVAGIAGQSGYGSQSVALSGGYEDDEDHGEWFLYTGSGGRDLSGNKRTNKLQSFDQKFENMNEALRVSCRKGYPVRVVRSHKEKRSSYAPESGVRYDGVYRIEKCWRKNGTQGCKVCRYLFVRCDNEPAPWTSDEIGDRPRPLPKIDELKGAVDITERKGDPSWDFDEEKGSWLWKKPPPESKKSVDIKAEDGTTIRVKRKAKNVSVKERLLKEFGCQICRKAMASPLTTPCAHNFCKACLEGAFSGQSFIRNRACGGGRTLRAQKNFMKCPSCSTDIADFLQNPQVNREMLAVIESLQRQAEDENSEESSDKNDENLHDPTEPHKRRKE

SEQ ID NO: 23 - DNA, 2157 bp, Glycine max
atgagtatgcagcagcttccgtgtgacagcgaaggcgcgtgtatggtgtgcaagggcttgccggggcaagaagagagactgttatgcgtcacgtgtgacaccccttggcacgtgccctgcctgttcgcccctccacccactctgtccgccaccgcacgatggctatgccctgattgttccattctggactctgacgttccaccagtccccgctcccgcccgcaaccaactggtggctgcaatgctggccgttgaaaatgacgcttctctcacccaacacgacaaggcccgaaaacgtcaagagcttttgactggaaaggctcccgcagacgacgacgacgacgacgaacaagagaataaatcatccttatcggatattctctccagatctctcaactgctccatctgtatccagttaccggagagacccgtcacgagtccgtgtgggcacagtttctgtttgaagtgctttgagaaatgggttcggcaagggaagaggaattgtgccaaatgccggcagattattccggccaagatgacaagccagccccgtatcaattctgcactggtgtttgcaatacgaatggcgaggcaggcttcaaacagtagtggtagtggccgaggaggagtgaggagtgttaaccatttccttcacaatcaagatagacctgatgagccattcaccactgaacgcgcacagaggagtggtcgtgccaatgcggctagcggtaaaatattcgtgacagtgcctacggatcattttggtccaatcacggcagagaatgaccctctgcggaatcaaggtctgctggtaggtgaaagctggagagacagactcgaatgcaggcaatggggtgctcacttcgtccctgtgggtggcattgctggacaatcagaccgcggtgcacaatctgttgttctttctggtggttatgttgatgacgaggaccatggagaatggtttctctacaccggaagcggcggtaaggatcttagcggcaacaaacgcacaaacaagagtcactcttttgaccagaagtttgagaaatacaaccgtgcacttcaagttagctgtctccagggttatcccgttcgagttgtcagatctcacaaagaaaagcgatcctcatatgcccctgagactggtgtgcggtacgatggaatttatagaattgaaaagtgctggcagatagcagggttgcagggtttcaaagtttgccggtatctattcgtcaggtgtgacaatgaacctgccccttggacaagtgatgatcatggagataggcccagacccttgccggtcattcgtgagctgaaaaaggctacagtcatacatgaaaggaccgaatctccatcttgggattttgatgtgagtgattatcgagtagtccattatccttttcaaatacttgaggaggattctcgttggaaatggaagaaaccaccgcctcccagcagacaaaaggtacaaaatgttgaacccgtagaggtagcaagggcaaagtcaaataaagaagtaaagaaattccaacttaagtcaatcaaggaacaattgcagagagggttctcgtgcatgatatgcaaggaggttatggtttcaccagtgacaacaccgtgtgctcataacttctgcaagtcctgtttggaaggtgaatttgctggtcaggcttttgtgaaggagagaagtaagggtgggagaacacttcggtcccaaaaaaatgtgatgaaatgtccttcttgttctattgacatttctgattatcttcagaacattcaggttgacatagatttgaagagtgcaattgagtcattgaaagccaaggtcgaagaaattggagaatcggtggagtcaagtgaagatgcagatggattacaggatgatggtgctggcaaggatgaagatactgactccagaaacaaaaattctgtgcaggagttgaatggtctacctgaaggatctgatgttggtgaacttgaagataccaccaataaggagccagatccagcaatgaagtgcaatggaaagagaaagaaaggtgattatggaaatcaatcgcctgatgataaaatggaaaaaagaggtaaaaattacaaaacaacagaggaagaattgcatgaagaaaatgattcttcatcaagtcctctccatcctcaatga

SEQ ID NO: 24 - protein, 718 aa, Glycine max
MSMQQLPCDSEGACMVCKGLPGQEERLLCVTCDTPWHVPCLFAPPPTLSATARWLCPDCSILDSDVPPVPAPARNQLVAAMLAVENDASLTQHDKARKRQELLTGKAPADDDDDDEQENKSSLSDILSRSLNCSICIQLPERPVTSPCGHSFCLKCFEKWVRQGKRNCAKCRQIIPAKMTSQPRINSALVFAIRMARQASNSSGSGRGGVRSVNHFLHNQDRPDEPFTTERAQRSGRANAASGKIFVTVPTDHFGPITAENDPLRNQGLLVGESWRDRLECRQWGAHFVPVGGIAGQSDRGAQSVVLSGGYVDDEDHGEWFLYTGSGGKDLSGNKRTNKSHSFDQKFEKYNRALQVSCLQGYPVRVVRSHKEKRSSYAPETGVRYDGIYRIEKCWQIAGLQGFKVCRYLFVRCDNEPAPWTSDDHGDRPRPLPVIRELKKATVIHERTESPSWDFDVSDYRVVHYPFQILEEDSRWKWKKPPPPSRQKVQNVEPVEVARAKSNKEVKKFQLKSIKEQLQRGFSCMICKEVMVSPVTTPCAHNFCKSCLEGEFAGQAFVKERSKGGRTLRSQKNVMKCPSCSIDISDYLQNIQVDIDLKSAIESLKAKVEEIGESVESSEDADGLQDDGAGKDEDTDSRNKNSVQELNGLPEGSDVGELEDTTNKEPDPAMKCNGKRKKGDYGNQSPDDKMEKRGKNYKTTEEELHEENDSSSSPLHPQ

SEQ ID NO: 25 - DNA, 1875 bp, Glycine max
atggcgcagcttccgtgcgactccgatggcgtctgcatgctctgcaaactcaaacccagtccctcccaaaccctctcctgtggaacgtgtgccactccctggcaccttccgtgtctcccttcgccccctctctccctctctgactcccattgggactgccccgactgttctgacaccttctgccatcaccccgtcgctcccaccgctcaccttgtctccgccattcacgccattcaggccgacacctctctcactgaccaacagaaggccataaaacgccaacaactcctcgctggctctgcccacccctcaaaggacaaaaccaaagccaaagacatttttgatggaagcttaaactgctccatatgcatgcaactacccgatagacccgtcacgacgccttgtgggcacaacttctgtttgagatgtttcgagaagtggatcggacagggaaagcgcacttgcgccaattgccgtgctcaaatcccgaccaagatggcgagccagccgagaatcaattctcagttggccatggccatccgattggcgaaggcagccaagtcggaaggttcttcgggcccacccaaggtctatcattttgtacgcaatcaggaccgtcctgataccgcattcaccacagagcgagccaagaagactggaaaggcaaatgcttgcagtggtaagattttcgtgactgttcctcccgaccattttgggcctatcccggctgaaaacgaccccacccggaaccgtggtgttctggtcggggacacgtgggaggaccggatggagtgtcggcagtggggtgcccatttgcctcatgtcgccggcattgctggacagagtgcttatggttcccagtctgttgccctttctggtggctacgaggatgacgaggaccatggtgagtggttcctctacactggcagtggtggcagagatctcagtggcaacaaacgcaccaacaagctacaatcctttgaccaaaagtttgaaaacatgaatgaggccttgagagtaagctgtaggaagggttatcccgttcgcgttgtaaggtcgcacaaggaaaaacgttcttcttatgcaccggaatctggagtgcgttatgatggagtttacagaatagagaaatgctggcgtaaaaatggaatacaaggttgcaaggtttgcaggtatttgtttgtgagatgtgacaatgagccagcaccgtggacaagtgatgaaattggagatcgcccacgcccactacctaaaattgatgagttgaagggtgcagttgatgtaactgaaagaaagggtgatccatcatgggattatgatccggagaaggggtgctggttgtggaagaagcctccacccgaaagcaagaaaccagtggacattaaatctgaaaatggaacaacaatcagagttaaacggaaagcagaaaatgtgtccgtgaaagaaaggcttttgaaagagtttggttgtcaaatttgtcgcaaggttatggcttcccctctcactacaccttgtgctcacaacttctgcaaagcctgtttggagggtgccttttctggccaaagtttcatcagaaatagggcatgtggaggtggacgcactttacgagcacagaaaaatgttatgaaatgcccatcttgttcaaatgacattgctgactttctccagaatccacaggttaatagagaaatgctggctgttatagaatcattacaacgccaggctgaagaaaattctgaagagttaagtgataaaaatgatgaaaatctgcatgatccaacagaggtttctaaacccagtgattctactgataaggtcttggaggaaattaaggacaatgagctgaatcagccacacaagcgaaggaaggagtga

SEQ ID NO: 26 - protein, 624 aa, Glycine max
MAQLPCDSDGVCMLCKLKPSPSQTLSCGTCATPWHLPCLPSPPLSLSDSHWDCPDCSDTFCHHPVAPTAHLVSAIHAIQADTSLTDQQKAIKRQQLLAGSAHPSKDKTKAKDIFDGSLNCSICMQLPDRPVTTPCGHNFCLRCFEKWIGQGKRTCANCRAQIPTKMASQPRINSQLAMAIRLAKAAKSEGSSGPPKVYHFVRNQDRPDTAFTTERAKKTGKANACSGKIFVTVPPDHFGPIPAENDPTRNRGVLVGDTWEDRMECRQWGAHLPHVAGIAGQSAYGSQSVALSGGYEDDEDHGEWFLYTGSGGRDLSGNKRTNKLQSFDQKFENMNEALRVSCRKGYPVRVVRSHKEKRSSYAPESGVRYDGVYRIEKCWRKNGIQGCKVCRYLFVRCDNEPAPWTSDEIGDRPRPLPKIDELKGAVDVTERKGDPSWDYDPEKGCWLWKKPPPESKKPVDIKSENGTTIRVKRKAENVSVKERLLKEFGCQICRKVMASPLTTPCAHNFCKACLEGAFSGQSFIRNRACGGGRTLRAQKNVMKCPSCSNDIADFLQNPQVNREMLAVIESLQRQAEENSEELSDKNDENLHDPTEVSKPSDSTDKVLEEIKDNELNQPHKRRKE

SEQ ID NO: 27 - DNA, 2019 bp, Medicago truncatula
atggcgaagcagctaccttgtgacgccgatggtgtttgcatggcgtgtaaaacgaagcctctagaaactgaaacccttcattgtcgaacatgtgcaactccatggcatgttccttgtttacctctgattccaacctcaatcctcgattgggaatgctccgattgttctcaacccgtcgccggcgattccgctgctccgtctgttgccggagatctcgtttccgctattcgcgccattgagaacgatgtttcgcttaccgatgatgaaaaagcgaagaaacgacaagaactcgttggtgggacttctaattcacctgctgaaacaaacaatagacgcagtaacggcttgcttgatatcttcgatggtagccttaactgttccttctgcatccagttgcctgagagacctgttactacaccatgtgggcataatttttgtttgaagtgttttgagagatggattaagcaaggaaatcgaacttgctcgaattgtaggactgcaattccagcaaagatggcgagcaatccacgaatcaatgcacagttggcgattgcgattcgtatggccaaggtagcaagttcgcaaggtggtgttggaggaagtagtgttccaaaagtttatcacagtgttgacaatgatgagcgccctgatactgcttatacaactgagagagcaaagaaaacaggaaaggctaatgcttgcagtggaaagatatttgtgaccattccgaaagatcattttggaccgattgttgctgagaatgatccaacaaggaaccgtggggttcttgttggtgatacatgggaggataggatggactgtaggcaatggggagctcacttaccccacgtggctggcattgctggtcagagtacacacggggctcaatctgttgcactttcaggtggttatgtcgatgatgaggaccacggtgagtggttcctttacacaggaagtggcgggagagatctcagcggtaataaacgtacaaacaaaaatcagtcttttgatcaacagtttgagaacatgaatgaggctctcagactgagttgtcgaaaaggttatcctgttcgtgttgttaggtcccacaaggagaaacgttctgcttatgcaccggaagcaggagtgagatatgatggggtttatagaattgagaaatgctggcgcaaaattggaatacaaggtcataaggtttgcaggtatttgtttgtgaggtgtgacaatgagccagctccatggacaagtgatttatccggagaccgtccccgtccactacctataattaaggagtttaaaggtgcaattgacattactgaaagaaagggtgatccatcatgggactttgatgaggaaaagggctgttggttgtggaagaagcctccacctcgaagtaagaagccagtgaacattgtggatcccgtagatggaagtaaaataaaagttgttaggccaaagacaaaaaaggtgtccttcaaaatcaaggataggctattgaaagagttcggttgcaatatatgtcgtaaggtgttggcttcgcctctcactacgccttgtgctcacaacttctgcaaagcttgcctggagggtgccttttctggccaaagttatattaggaatagggcatcccaaagtggccgcgctttgcggacacaaaagaacattatgaaatgccctacttgttcaactgacatagctgattatcttcagaatccacaggtaaacagggaaatgatgggtgtcatagaatcactccagcaacaggctgaacagatggaggagagttctgaagaatcaagtgtaaaaagtgatgaaaatctcaagccggatgaggagacggaggtttcaaagccctgtgattcaagtgaaaaagtcttgaaggaaattaacaagaatgatctgaatcctccacagaagcggaggaaaggtactggtggcaaggctgtggcgaacacggaggaacatattgacgaggtaaacgtaggaagcaaagcaatggctttaaataaggctttaaattag

SEQ ID NO: 28 - protein, 672 aa, Medicago truncatula
MAKQLPCDADGVCMACKTKPLETETLHCRTCATPWHVPCLPLIPTSILDWECSDCSQPVAGDSAAPSVAGDLVSAIRAIENDVSLTDDEKAKKRQELVGGTSNSPAETNNRRSNGLLDIFDGSLNCSFCIQLPERPVTTPCGHNFCLKCFERWIKQGNRTCSNCRTAIPAKMASNPRINAQLAIAIRMAKVASSQGGVGGSSVPKVYHSVDNDERPDTAYTTERAKKTGKANACSGKIFVTIPKDHFGPIVAENDPTRNRGVLVGDTWEDRMDCRQWGAHLPHVAGIAGQSTHGAQSVALSGGYVDDEDHGEWFLYTGSGGRDLSGNKRTNKNQSFDQQFENMNEALRLSCRKGYPVRVVRSHKEKRSAYAPEAGVRYDGVYRIEKCWRKIGIQGHKVCRYLFVRCDNEPAPWTSDLSGDRPRPLPIIKEFKGAIDITERKGDPSWDFDEEKGCWLWKKPPPRSKKPVNIVDPVDGSKIKVVRPKTKKVSFKIKDRLLKEFGCNICRKVLASPLTTPCAHNFCKACLEGAFSGQSYIRNRASQSGRALRTQKNIMKCPTCSTDIADYLQNPQVNREMMGVIESLQQQAEQMEESSEESSVKSDENLKPDEETEVSKPCDSSEKVLKEINKNDLNPPQKRRKGTGGKAVANTEEHIDEVNVGSKAMALNKALN

SEQ ID NO: 29 - DNA, 2253 bp, Oryza sativa
atggcttcgtcatcaaatccatcaaatcttccctgctctagtgatggtgtatgcatgttatgcaaggtgcttacaacagaggtagagcagctgcgttgtagcacctgtgctacgccatggcatactccctgcctctccagcataccgccccttacagatgtggcccactgggtctgtccagattgctccggtgatgtcacagccagctacccgccatctgatgttgttcgtccggagagcagcctcatcgctgcgattcgtgtgattgaggctgatccggtgctgtccatccaagagaaggctcgtcgtcgccaggaacttcttggccatgccggtgatgcaggggctgcaataactgaagctgttggggaaaacgtagaggacagtgagagcaacaatcctttgtctatgctgaacaagaacatcaactgctcattttgtatgctgcttccagagcgacctgtcactacaccatgtggccacaacttctgcctgaaatgcttccgaaggtggattgaaaatggtaaaagagcttgtgtgatctgccgagcacctattacacaaaaagtagcacaagatctaagaattaacttggcactagtccaagctatccgcatggccaaggctgcaaacaatgctagcacaactggtgaaacaacggtttatcattataaagaaaatgaagataaacctgacagagctttcactactgaaagagcaaagagagctggaatggcaaatgcttcaagtggacaaatatttgtgactattgcaccagactattttggtccaattcttgaagatcatgacccaaggaggaaccgcggtgttcgagtcggggaccattggaaagatagaatggaaggtagacagtggggtgctcatttccctcatattgctgggattgccggccaatctacacatggggctcaatcagttgccctctcaggaggttatttagatgatgaagatcatggagagtggttcctctatactggaagtggaggaagggatctaagtggaaacaagcgaacaagcaaggagcagtcttttgatcagaagtttgagaagctgaatgctgcattacgtgttagctgcttaaatggctatcccgtgagagttgtacggtcttttaaagagaagcgctcaccatatgctccagagtctggtgttaggtatgatggaatctataggattgagaaatgctggaggaaaactggagttcagggtacattcaaagtgtgcagtgatgaacatggagaccatccaaggccattaccagatatcgaagagctgaaaaatgcaattgatattactgagaggaaaggaaacccagcatgggattttgatgcaacagatggatggaagtggatgattactccacccatcagcaggaaggctgtcgtaactggagatcctagaggcaagaaaatgcaaggagcagcaaggcatacaaataacttgtcaatgagagaaaggctgttgaaagaattcagatgctccatatgtaggaacgtgatggaagagccagtgacaacaccgtgtgctcacaacttctgcaagaaatgcctgcttgggtcatatgataatctttcccttacagaggagagaagccgtggtggtcggaccctccgggcacgaaagattgttaaaaagtgcccttcttgtccaagtgatatcgctgatttcgtacagaatcctcaggtaaaccgtgacattatgaacgttattgaatcactccaaaaagaagctgagaaggaagatcatgctagggtgagtggagaaggcagcagtgcagcacttgtagattctgatgatgaaaatgacactgcttgggagaaccaagatgatggtaatctggatgagggaggttgcaacaatcctgaggacatgataactgaatctgttgatttgaattctgttactaatgttgataatactgaaaacaaggtggaagttcagcagcctcacaagcgtaccgccggtgccgggaaggggaaaggtggcaaatgggctaggacaagctctgcaccaggtgatgcagatgccaggaatgttgtgacttcaactgaaacattggatggaatagctgctgagaatgtggctgatttagtacaaattgaggattgcactttcactggtgtggaaagagccgaccccaatgcgttagaagttgatggcaagaatatgattccagacttttcagaagctgagaaggttaaccctaaacaggatcaagaagttcttccatga

SEQ ID NO: 30 - protein, 750 aa, Oryza sativa
MASSSNPSNLPCSSDGVCMLCKVLTTEVEQLRCSTCATPWHTPCLSSIPPLTDVAHWVCPDCSGDVTASYPPSDVVRPESSLIAAIRVIEADPVLSIQEKARRRQELLGHAGDAGAAITEAVGENVEDSESNNPLSMLNKNINCSFCMLLPERPVTTPCGHNFCLKCFRRWIENGKRACVICRAPITQKVAQDLRINLALVQAIRMAKAANNASTTGETTVYHYKENEDKPDRAFTTERAKRAGMANASSGQIFVTIAPDYFGPILEDHDPRRNRGVRVGDHWKDRMEGRQWGAHFPHIAGIAGQSTHGAQSVALSGGYLDDEDHGEWFLYTGSGGRDLSGNKRTSKEQSFDQKFEKLNAALRVSCLNGYPVRVVRSFKEKRSPYAPESGVRYDGIYRIEKCWRKTGVQGTFKVCSDEHGDHPRPLPDIEELKNAIDITERKGNPAWDFDATDGWKWMITPPISRKAVVTGDPRGKKMQGAARHTNNLSMRERLLKEFRCSICRNVMEEPVTTPCAHNFCKKCLLGSYDNLSLTEERSRGGRTLRARKIVKKCPSCPSDIADFVQNPQVNRDIMNVIESLQKEAEKEDHARVSGEGSSAALVDSDDENDTAWENQDDGNLDEGGCNNPEDMITESVDLNSVTNVDNTENKVEVQQPHKRTAGAGKGKGGKWARTSSAPGDADARNVVTSTETLDGIAAENVADLVQIEDCTFTGVERADPNALEVDGKNMIPDFSEAEKVNPKQDQEVLP

SEQ ID NO: 31 - DNA, 2370 bp, Oryza sativa
atgcctgatctcccctgcgacggcgatggcgtctgcatggtctgccgcgtcgcctcccctcccgaggtcgatctcctccgttgctccacctgcgccaccccgtggcactccccctgcctctccaagccccccgcccttgccgacgccgcccaatggagttgccccgactgctccggggactccaccgacgccccgcccccggccccggcaccgctcgcccctgggagtgccggccaactcgtcgccgccatccgcgccatcgagtgcgacgccaccctctccgaccaggaaaaggcacgccgccgccaggagcttctcggcggcgccgcgcccgccggtgccgacgccgatgatgacgagggggacgacgtcctcgaggtcatcggcaagaacttcagctgcgccttctgcatgaagctgcccgaacgccccgtcaccacaccatgtggccataacttttgcttgaagtgcttccagaaatggatccacagcggaaaaaggacatgtggtaaatgccgggcacaaataccagcaaaaatggcagagcagccaagaatcaactcagcattagtttctgttatccgtatggctaaggtttcaaagaatgccaactcagctgtctctgcagctgcgtatcattacatacgaaatgatgatagacctgacaaggcttttacaactgaaagggctaagagggctggaaaagctaatgcttcaagtggccagatctttgttactatcccacccgaccattttggccccattcttgcagagaatgaccccaagagaagcattggtgttctagttggggatacatgggaagacagacttgagtgcaggcaatggggtgcccattttcctcacgtggctggtattgctggccaatccacacatggtgctcagtcggtagccctctcgggtgggtatgtcgatgatgaggaccatggggaatggtttctatatactggaagtggtggaagagatctaagtgggaacaagcgtacaaacaaggagcagtcctcagaccagaaatttgagaagctgaatgctgctcttcgtattagttgcctcaagggttaccctgtcagggttgtgcggtcccacaaagagaagcgttcttcatatgctcctgaagctggtgtgaggtatgatggagtttacaggattgaaaaatgttggaggaagattagtgttcagggtaaattcaaggtttgcaggtatctctttgtacgttgtgacaatgaaccagctccttggactagtgatatttatggtgaccgtccgaggccactccccaaagttgatgagctgaaaggtgcaacagacatatcagagaggaaaggaactccttcatgggactttgatgagaaagaaggctggaagtgggtgaagcctccaccaatcagcagaaagcctaacctatcaggggatcctgcaactgacaaggaaatccggagggttgcaaggcgtgcccagatgtctgtgactgaaaggctgctgaaagagtttggatgttccatttgcaagcaagtgatgaaggaaccactcactactccatgtgctcataacttctgcaagttgtgtttggttgggacatatggtagtcaatcgtctatgagggagagaagccggggtgggcggactctaagggcacagaagattgtgaagaagtgcccttcatgtccaactgatatttgtgacttcctagagaatccacagatcaatcgagagatgatggatttgattgagtccttgcaaagaaaggctgttgaagaaggagataccaagacaagctcagatgttagcaatggtgctgagtcatctggagatgatggaaacaacgaagctttagagaagggagaggatgatagcagcttgaaggatgatggcagcttgaaggatgatggcaaagtggtcaaggctgtggttgtaatcaaggaagaggacctgcagcctaagaagagcaaaggagaagatgagaaagaacaaggtgacaagaagatggacagtgctgatgtggtggacattgcagttgaaaagaaacaggcgacgaagcgggcttctgagaaggctgagaagaagcaggcaaggaagcgcaagggggatgctgttgccacaaatgatggtaaaaggatgaaaacaggtggtgatgctatggagacagcagcggaagaggatgctcccctgagcggcggaactcctgtgaagcgcaacagcaggaagagtagtgaggttgatgccaaaggcggtggcggtagtcctgttgtgagcagccctcgcagggtgacgaggagcaatgccaaggctagcggtgaagctgatggtagccctgcgacaaggaccaggagggctacccgcgctgaagcctga

SEQ ID NO: 32 - protein, 789 aa, Oryza sativa
MPDLPCDGDGVCMVCRVASPPEVDLLRCSTCATPWHSPCLSKPPALADAAQWSCPDCSGDSTDAPPPAPAPLAPGSAGQLVAAIRAIECDATLSDQEKARRRQELLGGAAPAGADADDDEGDDVLEVIGKNFSCAFCMKLPERPVTTPCGHNFCLKCFQKWIHSGKRTCGKCRAQIPAKMAEQPRINSALVSVIRMAKVSKNANSAVSAAAYHYIRNDDRPDKAFTTERAKRAGKANASSGQIFVTIPPDHFGPILAENDPKRSIGVLVGDTWEDRLECRQWGAHFPHVAGIAGQSTHGAQSVALSGGYVDDEDHGEWFLYTGSGGRDLSGNKRTNKEQSSDQKFEKLNAALRISCLKGYPVRVVRSHKEKRSSYAPEAGVRYDGVYRIEKCWRKISVQGKFKVCRYLFVRCDNEPAPWTSDIYGDRPRPLPKVDELKGATDISERKGTPSWDFDEKEGWKWVKPPPISRKPNLSGDPATDKEIRRVARRAQMSVTERLLKEFGCSICKQVMKEPLTTPCAHNFCKLCLVGTYGSQSSMRERSRGGRTLRAQKIVKKCPSCPTDICDFLENPQINREMMDLIESLQRKAVEEGDTKTSSDVSNGAESSGDDGNNEALEKGEDDSSLKDDGSLKDDGKVVKAVVVIKEEDLQPKKSKGEDEKEQGDKKMDSADVVDIAVEKKQATKRASEKAEKKQARKRKGDAVATNDGKRMKTGGDAMETAAEEDAPLSGGTPVKRNSRKSSEVDAKGGGGSPVVSSPRRVTRSNAKASGEADGSPATRTRRATRAEA

SEQ ID NO: 33 - DNA, 2370 bp, Oryza sativa
atgcctgatctcccctgcgacggcgatggcgtctgcatggtctgccgcgtcgcctcccctcccgaggtcgatctcctccgttgctccacctgcgccaccccgtggcactccccctgcctctccgagccccccgcccttgccgacgccgcccaatggagttgccccgactgctccggggactccaccgacgccccgcccccggccccggcaccgctcgcccctgggagtgccggccaactcgtcgccgccatccgcgccatcgagtgcgacgccaccctctccgaccaggaaaaggcacgccgccgccaggagcttctcggcggcgccgcgcccgccggtgccgacgccgatgatgacgagggggacgacgtcctcgaggtcatcggcaagaacttcagctgcgccttctgcatgaagctgcccgaacgccccgtcaccacaccatgtggccataacttttgcttgaagtgcttccagaaatggatccacagcggaaaaaggacatgtggtaaatgccgggcacaaataccagcaaaaatggcagagcagccaagagtcaactcagcattagtttctgttatccgtatggctaaggtttcaaagaatgccaactcagctgtctctgcagctgcgtatcattacatacgaaatgatgatagacctgacaaggcttttacaactgaaagggctaagagggctggaaaagctaatgcttcaagtggccagatctttgttactatcccacccgaccattttggccccattcttgcagagaatgaccccaagagaagcattggtgttctagttggggatacatgggaagacagacttgagtgcaggcaatggggtgcccattttcctcacgtggctggtattgctggccaatccacacatggtgctcagtcggtagccctctcgggtgggtatgtcgatgatgaggaccatggggaatggtttctatatactggaagtggtggaagagatctaagtgggaacaagcgtacaaacaaggagcagtcctcagaccagaaatttgagaagctgaatgctgctcttcgtattagttgcctcaagggttaccctgtcagggttgtgcggtcccacaaagagaagcgttcttcatatgctcctgaagctggtgtgaggtatgatggagtttacaggattgaaaaatgttggaggaagattagtgttcagggtaaattcaaggtttgcaggtatctctttgtacgttgtgacaatgaaccagctccttggactagtgatatttatggtgaccgtccgaggccactccccaaagttgatgagctgaaaggtgcaacagacatatcagagaggaaaggaactccttcatgggactttgatgagaaagaaggctggaagtgggtgaagcctccaccaatcagcagaaagcctaacctatcaggggatcctgcaactgacaaggaaatccggagggttgcaaggcgtgcccagatgtctgtgactgaaaggctgctgaaagagtttggatgttccatttgcaagcaagtgatgaaggaaccactcactactccatgtgctcataacttctgcaagttgtgtttggttgggacatatggtagtcaatcgtctatgagggagagaagccggggtgggcggactctaagggcacagaagattgtgaagaagtgcccttcatgtccaactgatatttgtgacttcctagagaatccacagatcaatcgagagatgatggatttgattgagtccttgcaaagaaaggctgttgaagaaggagataccaagacaagctcagatgttagcaatggtgctgagtcatctggagatgatggaaacaacgaagctttagagaagggagaggatgatagcagcttgaaggatgatggcagcttgaaggatgatggcaaagtggtcaaggccgtggttgtaatcaaggaagaggacctgcagcctaagaagagcaaaggagaagatgagaaagaacaaggtgacaagaagatggacagtgctgatgtggtggacattgcagttgaaaagaaacaggcgacgaagcgggcttctgagaaggctgagaagaagcaggcaaggaagcgcaagggggatgctgttgccacaaatgatggtaaaaggatgaaaacaggtggtgatgctatggagacagcagcggaagaggatgctcccctgagcggcggaactcctgtgaagcgcaacagcaggaagagtagtgaggttgatgccaaaggcggtggcggtagtcctgttgtgagcagccctcgcagggtgacgaggagcaatgccaaggctagcggtgaagctgatggtagccctgcgacaaggaccaggagggctacccgcgctgaagcctga

SEQ ID NO: 34 - protein, 789 aa, Oryza sativa
MPDLPCDGDGVCMVCRVASPPEVDLLRCSTCATPWHSPCLSEPPALADAAQWSCPDCSGDSTDAPPPAPAPLAPGSAGQLVAAIRAIECDATLSDQEKARRRQELLGGAAPAGADADDDEGDDVLEVIGKNFSCAFCMKLPERPVTTPCGHNFCLKCFQKWIHSGKRTCGKCRAQIPAKMAEQPRVNSALVSVIRMAKVSKNANSAVSAAAYHYIRNDDRPDKAFTTERAKRAGKANASSGQIFVTIPPDHFGPILAENDPKRSIGVLVGDTWEDRLECRQWGAHFPHVAGIAGQSTHGAQSVALSGGYVDDEDHGEWFLYTGSGGRDLSGNKRTNKEQSSDQKFEKLNAALRISCLKGYPVRVVRSHKEKRSSYAPEAGVRYDGVYRIEKCWRKISVQGKFKVCRYLFVRCDNEPAPWTSDIYGDRPRPLPKVDELKGATDISERKGTPSWDFDEKEGWKWVKPPPISRKPNLSGDPATDKEIRRVARRAQMSVTERLLKEFGCSICKQVMKEPLTTPCAHNFCKLCLVGTYGSQSSMRERSRGGRTLRAQKIVKKCPSCPTDICDFLENPQINREMMDLIESLQRKAVEEGDTKTSSDVSNGAESSGDDGNNEALEKGEDDSSLKDDGSLKDDGKVVKAVVVIKEEDLQPKKSKGEDEKEQGDKKMDSADVVDIAVEKKQATKRASEKAEKKQARKRKGDAVATNDGKRMKTGGDAMETAAEEDAPLSGGTPVKRNSRKSSEVDAKGGGGSPVVSSPRRVTRSNAKASGEADGSPATRTRRATRAEA

SEQ ID NO: 35 - DNA, 1860 bp, Physcomitrella patens
atgacggacctaccgtgtgatgcagacggaaaatgcatggtatgcaaaatcgtgccacctgacagcgatgcgataatgtgcggtagttgtgctagtccgtggcatatgcgatgtctgaatcctcccatggaatttgtgcctcttggcgactgggattgtcctgactgttcgcttccacccactatcgccacaccttcggcagtcgttaactccgtacccgaggcctgtttagtgaacaagattcgtgcgattcaagctgactcaactctctctgaagctgagaaagcaaaaagacggcaggagctcatgagcaaagggttgaacgatgaaagttctgccaagttgtcttccttgaatgttgataagaaaagtgctgacgggaaaaagcggaacgcgacgttagaaatgatggataatagcctgaattgtattttctgcatgcagcttgctgaaagaccagtaactacaccttgtggtcacaatttttgcttaaaatgctttcagagatgggtcgggcaaggtaaaaagacgtgcggaaaatgtcgaagtgcgattcctgctaaaatggcaagcaatcctcgcattaattctgctttagttatggccattcgtatggccaggtcagtcggaaatagtaatggcggtccaccaaaaacttacacataccgtgataacgacagcagaccagacaagtgctttacgaccagccgagcggtaaagactgggaaagctaacgcttgcagtggtaaaatattcgtcactattgcacctgatcattttgggcctatcacagctgaacatgaccctactcgaggtcaaggagttttagtcggggaatgctgggaggatcgcatggagtgcaggcagtggggtgcacatctacctcatgttgccggcattgcggggcagtctgattatgggtcgcagtctgttgcactttctggcggttacgaagatgacgaagatcacggcgagtggttcttgtatacaggcagcggtgggagggatttgagtgggaacaagcgcaccaataaagaacaatcgtttgatcagaaattcgacaagatgaacgaagcattacgagttagttgcaaacatggtttccctgtacgcgttgtgaggtctcataaagagaaaaggtccgcttatgctccagatgcaggtgtaagatacgatggtgtgtacaggatcgagaagtgctggcgtaaaaagggaattcagcagggtcacaaggtgtgtcgttatctgtttgtccgctgtgacaacgagcccgcaccttggacaagtgatgagcatggagatcgtcccaggcctcttcctgtcgttgaagagctaagatcggcaactgatgtctttgaaagaaaatcgtcacctgcctgggcttatacggaaggggtaggatggggatggtcccgggaacctccggcaagcaagaagacctcgggcagtggaccaagcgaggcaacccagaaacggaaacagctcagtgttcagcaacggctactaaaagaattcggttgcaatgcttgtcggaaagtactcaatcagccagtctccgtgccttgtgggcacaatttttgcaaggggtgcttggattctgtgtttgctggtcaggatacttcgcgagagcgaaagggtgtttcaggtcgcagtcttagaacgcagaaaatagttaagcgttgtcccaattgtaaggcagatattactgacttcctcgtttcgccccagatcaataggcagatggaagagataatactgaccctccagagtagtgcgaaggatgagcaaggaaacgatgcagttgaggatgacgatggaggtgaaggttccataccaggttcatttagtctgaactcctga

SEQ ID NO: 36 - protein, 619 aa, Physcomitrella patens
MTDLPCDADGKCMVCKIVPPDSDAIMCGSCASPWHMRCLNPPMEFVPLGDWDCPDCSLPPTIATPSAVVNSVPEACLVNKIRAIQADSTLSEAEKAKRRQELMSKGLNDESSAKLSSLNVDKKSADGKKRNATLEMMDNSLNCIFCMQLAERPVTTPCGHNFCLKCFQRWVGQGKKTCGKCRSAIPAKMASNPRINSALVMAIRMARSVGNSNGGPPKTYTYRDNDSRPDKCFTTSRAVKTGKANACSGKIFVTIAPDHFGPITAEHDPTRGQGVLVGECWEDRMECRQWGAHLPHVAGIAGQSDYGSQSVALSGGYEDDEDHGEWFLYTGSGGRDLSGNKRTNKEQSFDQKFDKMNEALRVSCKHGFPVRVVRSHKEKRSAYAPDAGVRYDGVYRIEKCWRKKGIQQGHKVCRYLFVRCDNEPAPWTSDEHGDRPRPLPVVEELRSATDVFERKSSPAWAYTEGVGWGWSREPPASKKTSGSGPSEATQKRKQLSVQQRLLKEFGCNACRKVLNQPVSVPCGHNFCKGCLDSVFAGQDTSRERKGVSGRSLRTQKIVKRCPNCKADITDFLVSPQINRQMEEIILTLQSSAKDEQGNDAVEDDDGGEGSIPGSFSLNS

SEQ ID NO: 37 - DNA, 1959 bp, Physcomitrella patens
atggcggacttaccgtgtgacgcagatggaatgtgcatggtgtgcaaaatcgtgccacctgactgcgatgttcttctgtgcagtagttgtgttagtccgtggcacatgcgatgtctgaatcctcctgtaaagcttgtgcctcttggcgactgggattgtcctgactgtctacttccacctccttccgacatgccttccatcgtccagaagcccgtagcggtacccgaggagggcaatttggtgagcaagattcatgcaattcaagctgactcaaccctcacagatggtgagaaagctaaaagacggcaggaactcatgagcaaagggctggttactaattattccgccgaagcaagttccgctaatggcgacaagaaaagtgctgacgggaataagcgcaatgcgacgctagaaatgatggataacagtcttaattgcatcttctgtcttcagcttgctgagagaccagtgacaacaccatgtggacacaacttttgcttgaagtgcttccagagatgggttgggcaaggaaaaaagacgtgtggaaaatgtcgagctgcgattcctgctaaaatggcaaccaatcctcgcattaattcagctttagtaatggcgattcgtatggccagatcagtcgtaaatagtaatagcggtccatcgaaagtttacacataccgtgataatgacagcagaccggataagtgcttcaccactagccgagcagtgaagacggggaaagctaatgcctgtagtggcaaaatatttgttactattgcacctgatcattttgggcccattacagctgaatatgatcctacgcgaggtcaaggagttctagtcggagagtgctgggaggatcgcatggaatgcaggcagtggggtgcacatctacctcatgttgcaggcattgcagggcagtctgactatggttcgcaatctgtagcactttctggcggttatgaagatgatgaagatcatggcgagtggtttctgtacacaggcagcggtgggagagatttgagtgggaacaagcgcaccaacaaagagcaatcattcgatcagaagtttgataagatgaacgaagctttgcgagttagttgcaagcatggttaccctattcgtgttgtgaggtcacataaagagaagaggtcagcttatgctccagatgcaggtgtaagatatgatggtgtatataggatcgaaatgtgctggcgtaagaaggggggtcacaaggtctgtcgttacctattagtccgctgcgacaatgagccggctccctggacaagtgatgagcatggggaccgtccaagacctcttcctgtggttaaagagctaaagtcggcaactgatgtatttgaaaggaagtcatcacctgcctgggcctatacggaaggagtaggatggggatggtcccgcgaacctccggcaagcagaaagacttcaggaggtgggccgagcgaggcaacacagaaacggaaacaacttagtgtccagcaacggttacttaaagagttcggttgcaatgcttgtcggaaagttctcgatcagccaatttccgtgccctgtggacataatttctgcaagagctgcttggattctgtgttttctagtcaagacagccgagagcgaaagggtgtttccggtcgtactcttcgaacgcaaaaagtagtaaagcgttgtcccaattgcaagatagatataagtgaattcctcgtgtctcctcagatcaataggcagatggaagaggtcatacagatgctccatgatactgctaaggatgagcaaggaagtgatggtgttgaggatgacgagggagataatgactccagatcaagtgtgttaaatcacgatcccctagtttcactctggctgtttcgtagaaaaggaagaactacacacttaggagcgaaatttaatatctttacgcttattggaacaactgcatgtgtttacagataa

SEQ ID NO: 38 - protein, 652 aa, Physcomitrella patens
MADLPCDADGMCMVCKIVPPDCDVLLCSSCVSPWHMRCLNPPVKLVPLGDWDCPDCLLPPPSDMPSIVQKPVAVPEEGNLVSKIHAIQADSTLTDGEKAKRRQELMSKGLVTNYSAEASSANGDKKSADGNKRNATLEMMDNSLNCIFCLQLAERPVTTPCGHNFCLKCFQRWVGQGKKTCGKCRAAIPAKMATNPRINSALVMAIRMARSVVNSNSGPSKVYTYRDNDSRPDKCFTTSRAVKTGKANACSGKIFVTIAPDHFGPITAEYDPTRGQGVLVGECWEDRMECRQWGAHLPHVAGIAGQSDYGSQSVALSGGYEDDEDHGEWFLYTGSGGRDLSGNKRTNKEQSFDQKFDKMNEALRVSCKHGYPIRVVRSHKEKRSAYAPDAGVRYDGVYRIEMCWRKKGGHKVCRYLLVRCDNEPAPWTSDEHGDRPRPLPVVKELKSATDVFERKSSPAWAYTEGVGWGWSREPPASRKTSGGGPSEATQKRKQLSVQQRLLKEFGCNACRKVLDQPISVPCGHNFCKSCLDSVFSSQDSRERKGVSGRTLRTQKVVKRCPNCKIDISEFLVSPQINRQMEEVIQMLHDTAKDEQGSDGVEDDEGDNDSRSSVLNHDPLVSLWLFRRKGRTTHLGAKFNIFTLIGTTACVYR

SEQ ID NO: 39 - DNA, 2022 bp, Populus trichocarpa
atggaactcccgtgcgacggagccggcatttgcatggtctgcaaaaacaagccaccaagtgaagagaccctcgcgtgcaaaacatgtgtcaccccctggcacgccacgtgtctcgtctccccccctcaggcgctttctgatacgctgcaatgggagtgccctgactgctccatgattcatccgccgtccacctccgccttcgcctccggaagatcggaggattccggtgatctcatcgcgtcgattcggaagatcgaggatgacaaatcgttgactgaacaggagaaggcaaagaaacgtcaggagctgttgagtggcgccgccgctggtccgtcctcattggacggcgaggaaaagaaagagaagaatgacgtccttgatatactcgataaggagttgacttgctctttctgcatgcaaatgcttgatagaccggttacaactccatgcggtcataacttttgcttgaagtgcttccagagatggattggacaagggaaacgtacatgtgcatattgccgtgtacaaatcccacccaagatagcaagccagcctcgtatcaattctacacttgttattgccatacgtatggcaaggatgtcaagatccagcaatgctgggggtgctgcgaaggtatatcattttgtccacaaccaaaacaggccagacaaagcatacacaacagagcgggcaaagaaagctggcaaggctaatgcttgtagtgggaagatctttgtcacagttgctcctgatcactttgggccaatccctgcagagaacgacccagaaagaaatatgggtgttttggtgggagagatatgggaggataggctggcatgcaggcaatggggtgcccatctcccccatgttgcaggaattgctggtcagtctacttatggcgcgcaatcggtggctctttctggaggttatattgatgacgaggaccatggtgaatggtttctttacactgggagtggaggaagggacctgagcggcaataaacgcacaaacaaggaccagtcctttgaccaaaagtttgacaagatgaacgaggcactacgattaagctgcctaaagggctatcctgtaagagtggttaggtctcacaaagagaagcgatcatcatatgctccagaaacaggtgtgcgttatgatggggtttatagaattgagaagtgttggcgtaagaatggaatacagggctttaaagtttgcaggtatctctttgtcagatgcgacaacgagcctgctccatggacgagtgatgttcaaggggaccgtccgaggcctctgcctgtcatcaaggaattaaagaatgcaattgatataactgaaaggaaggggtccccttcctgggactatgaggatgaaaaaagttgctggatgtggaaaaagccacctccagccagtaaaaaaagagttgctgatagtgtaggtccagaagatggcaaagtgattaggataatcaagcgacaaaaagcaaatatatctgttagagaaaaacttctgaaagagtttagttgtcaaatttgccggaaggtgatggccaatccaatcactaccccatgtgcccataatttctgcaaagcatgtcttgagggtgcctttgctggccaaagtctcactagacaaagaggtcaaggaagacggacattaagagcgcaaaagaatgttatgaaatgtccatcttgtactattgacatagctgactttcttcagaacccacaggtgaatcgggagttgatgggtgtcatagaatcactacaacaacaagctgagcaggaaaaactggacaacaattcagaagagtgtagtgaagagagtgatgccactgagcaacaacgagatttggttgctgatgaccaaattgccgaagagccaaaggatgaatcccaaaatgcacagaagcagaaaaaagaaactgatgatgatgacattatggatccatcatcaaatgtgcagacaatgagtccagggaaggagcaagaagccccaaccactactgatagagccagtcaataa

SEQ ID NO: 40 - protein, 673 aa, Populus trichocarpa
MELPCDGAGICMVCKNKPPSEETLACKTCVTPWHATCLVSPPQALSDTLQWECPDCSMIHPPSTSAFASGRSEDSGDLIASIRKIEDDKSLTEQEKAKKRQELLSGAAAGPSSLDGEEKKEKNDVLDILDKELTCSFCMQMLDRPVTTPCGHNFCLKCFQRWIGQGKRTCAYCRVQIPPKIASQPRINSTLVIAIRMARMSRSSNAGGAAKVYHFVHNQNRPDKAYTTERAKKAGKANACSGKIFVTVAPDHFGPIPAENDPERNMGVLVGEIWEDRLACRQWGAHLPHVAGIAGQSTYGAQSVALSGGYIDDEDHGEWFLYTGSGGRDLSGNKRTNKDQSFDQKFDKMNEALRLSCLKGYPVRVVRSHKEKRSSYAPETGVRYDGVYRIEKCWRKNGIQGFKVCRYLFVRCDNEPAPWTSDVQGDRPRPLPVIKELKNAIDITERKGSPSWDYEDEKSCWMWKKPPPASKKRVADSVGPEDGKVIRIIKRQKANISVREKLLKEFSCQICRKVMANPITTPCAHNFCKACLEGAFAGQSLTRQRGQGRRTLRAQKNVMKCPSCTIDIADFLQNPQVNRELMGVIESLQQQAEQEKLDNNSEECSEESDATEQQRDLVADDQIAEEPKDESQNAQKQKKETDDDDIMDPSSNVQTMSPGKEQEAPTTTDRASQ

SEQ ID NO: 41 - DNA, 2322 bp, Sorghum bicolor
atgccggacctcccctgcgacggcgatggcgtctgcatggtctgccgcgccgcctccccgccggaggtcgacctcctccgctgctccacctgcgccacgccctggcactccccgtgcctctccaagccccccgccctcgccgacgccgccagctggagctgccccgactgctcccccgaccccgccgccgccgccgctccctccggccccgccaacaccctcgtcgccgccatccgcgccatcgaggccgacaccaccctctccgaccacgagaaggcgcgccgccgccaggccctcctcgccggcgacgcccacgacgacgacgacgatgacgacgccgcggcagacgatgccctcgagatcgtcggcaagaacttcagctgcgtcttctgcatgaagctcccggaccgacccgtcacgacaccatgtggccataacttctgcttgaagtgcttccagaagtggattcagaacaggaagaggacctgtgcgaaatgtagggcacagatcccggccaaaatggctgagcagccaagaatcaactcagctctagttgaagttatcaggatggctaagatttcaaagaatcctaactctgctggctctgcagttccgtatcactacatacgaaatgatgataggcctgataaggcatttacaactgacagggctaagaagtctggaaaagcaaacgcatcaagtggccagatctttgtgaccattgcacctgatcattttggccccattcttgcagaaaatgacccacgcaggagtattggtgttcgagttggggaaacatgggaggaccgacttgagtgcagacaatggggcgctcactttcctcatgtggctggtattgctggccagtccacgtatggtgctcagtcagtagctctttcaggaggatatgaagatgacgaagatcatggagagtggtttctttacactggaagtggtgggagggatctaagtgggaacaagcggacgaacaaggaacagtcatctgatcaaaaatttgagaagctgaatgctgctttacgcattagttgcttgaagggctacccggtcagggttgtgcggtcgcacaaagagaagcgatcctcatatgctcctgaaagcggtgtaaggtatgatggggtttacagaattgagaagtgctggaggaagattggtattcagggtaagttcaaggtctgcaggtatctctttgtacgctgtgataatgaaccagctccttggaccagtgatgatcacggtgatcgtccaagacccttgccaaagataaaggagctgcaaggtgcaactgatataacagagaggaaagggcgtccttcatgggattatgatgagaaagatggctggaaatggatggtgcctccgccagtcagcaagaagcctgttctctctggggatcctgagactgacaagcaaatccggagatcaacaaagcgtgctcatttgtctgttgctgaaaggctgcttaaagagtttggttgttctatctgccgggcagtgattaaagaaccacttacgactccatgtgctcacaacttttgcaagacttgtttgcttgggaaatatgatagccaatcctctatgagggaaagaagccgtggtggtcggactctaagggcacagaagattgtgaagacgtgcccttcctgcccaactgacatctgtgacttcttagagaatccccagatcaatcgagaaatgatggagctgattgagactttgcaacgcaaggctgttgaagaaggcaaggtggcttcagatgatgctgaggaatgtggtgatggtgactcggaggaaaatgatggtgctttggtgaagggagaggaggatgatagcggcttgaatgaggaagagcaagacagtgcagatgctgatgctaatgctgatggttctgtgaagattgtggttgaaatcaaggagggaggaaaagatgataaaaagtcagagatgggtgcgactgaagtggtggatgtgttagttgatgaagatgctgcgaaacagacgaagaagcgcaaggttgatgaagatgctgtgaaacagacaaagaagcgcaagggtgatgctgagactggcaccaacggtgccaagaggatgaagagcagtgctgccgtggaagaggttgctgtgtgtggcactcctgtgaaacggaccaggaagagtggtgatatggatgctgaaggcaacggcagtcctgctgtgagcagtggccgcagggtgacccgtagcagcagtgtgaatgccactggagctgatgatagtccggcgaggaggaccagaagccgtgctggagctgatgctggttgctga

SEQ ID NO: 42 - protein, 773 aa, Sorghum bicolor
MPDLPCDGDGVCMVCRAASPPEVDLLRCSTCATPWHSPCLSKPPALADAASWSCPDCSPDPAAAAAPSGPANTLVAAIRAIEADTTLSDHEKARRRQALLAGDAHDDDDDDDAAADDALEIVGKNFSCVFCMKLPDRPVTTPCGHNFCLKCFQKWIQNRKRTCAKCRAQIPAKMAEQPRINSALVEVIRMAKISKNPNSAGSAVPYHYIRNDDRPDKAFTTDRAKKSGKANASSGQIFVTIAPDHFGPILAENDPRRSIGVRVGETWEDRLECRQWGAHFPHVAGIAGQSTYGAQSVALSGGYEDDEDHGEWFLYTGSGGRDLSGNKRTNKEQSSDQKFEKLNAALRISCLKGYPVRVVRSHKEKRSSYAPESGVRYDGVYRIEKCWRKIGIQGKFKVCRYLFVRCDNEPAPWTSDDHGDRPRPLPKIKELQGATDITERKGRPSWDYDEKDGWKWMVPPPVSKKPVLSGDPETDKQIRRSTKRAHLSVAERLLKEFGCSICRAVIKEPLTTPCAHNFCKTCLLGKYDSQSSMRERSRGGRTLRAQKIVKTCPSCPTDICDFLENPQINREMMELIETLQRKAVEEGKVASDDAEECGDGDSEENDGALVKGEEDDSGLNEEEQDSADADANADGSVKIVVEIKEGGKDDKKSEMGATEVVDVLVDEDAAKQTKKRKVDEDAVKQTKKRKGDAETGTNGAKRMKSSAAVEEVAVCGTPVKRTRKSGDMDAEGNGSPAVSSGRRVTRSSSVNATGADDSPARRTRSRAGADAGC

SEQ ID NO: 43 - DNA, 1713 bp, Selaginella moellendorffii
atggagctcgcttgcgagaatgggaggtgtctggtttgcaagagggagccgccagagcaggagatcctgccttgcgccagctgcggctgtctgtggcatcttcaatgcctcaagacgcccaagaccctgggggatgttcgtcccgactgggagtgcccggattgcgagtacgatccggccagcagcgggaagccgccgccaagcggtggtggtggagataaggcgctggtgacaaagatccgtgagataaatgcggataacactctctccgacgtccagaaagcagcgaagcggcagaagctactaagcaatggtgctgttccggctggaagtcaggaagatcgagatgagttgatttgcatcttttgccagggccctctcgatcgcccagtcacgacaccttgcggccacaacttctgccttagatgtctccagaagtggttcgcccagggacacaagaaatgcgggaaatgccgggtggatttccaccgaagttttattcagcagccaaagatcaacccggtgcttgtgcaagccattcgaatggccaagactgctgccagtggagtgagctcatcagcttccaagtccgtccagttcatccaaaacaagcacaggccagacaaagcattcaagagcgagagagcgaaaaaatccgggttgtcaaacgcgtcgagtggaaggatcttcgtcacggttggcaagtatcacttcggggctataccagccgagaatgaccccgagaggaacttgggagttttggttggcgagacttgggcggataggatggagtgcaggcaatggggtgctcacagcccccacgtcgcgggaatcgctgggcaaagcgacagaggtgctcagtctgtggtcatgtctggcggctacgaggacgacgaggaccatggagaatggtttctctacaccgggagtggtggcagggatttgagtggtaacaaacgaacgaacgatcaatcgttcgaccaggtcttttcgaaatcgaacagagctctctctgtaagctgtttgaaagggtaccccgtacgcgttgtgcgatcgtccaaagacgtgcgttctgcttacgcacctcaagaaggcctgaggtacgatggactgtacagaattgagaggtgctggcgaaaaatcggtctcaagggctttctggtgtgccggtatttgttcgtcaggtgtgacaacgagccggcaccctggacaagtgaggactatggcgatcggccacgtccacttccagagattgcagagcttaaaaatgccacggatgtcaaagaaaggaagacggaacggccggcatgggactggaaggaggacgagaatgtctggggatggactaaggcacctccaagttataatccgtcatctgctcggaggaaaagtgtatcgtcaaaggaaaaggaactgaaaaccagtacgtacttgcttaagtcattgcgtactcacgacaatgttctttctgtaggatttggatgtggcctttgcaaaaatgtattgcaacgtccgctttgcgctccttgtggccacaatttttgtcagtcttgtttgattggtcattttgctggccacaaggacgttcgagagaggggcaatggccgacggtccctcagagttcgaaagaaccagaagctgtgtcctcagtgtaacaaggacatcgctgatttcctggaagcccctgcagtaagtagacttctatcggaatga

SEQ ID NO: 44 - protein, 570 aa, Selaginella moellendorffii
MELACENGRCLVCKREPPEQEILPCASCGCLWHLQCLKTPKTLGDVRPDWECPDCEYDPASSGKPPPSGGGGDKALVTKIREINADNTLSDVQKAAKRQKLLSNGAVPAGSQEDRDELICIFCQGPLDRPVTTPCGHNFCLRCLQKWFAQGHKKCGKCRVDFHRSFIQQPKINPVLVQAIRMAKTAASGVSSSASKSVQFIQNKHRPDKAFKSERAKKSGLSNASSGRIFVTVGKYHFGAIPAENDPERNLGVLVGETWADRMECRQWGAHSPHVAGIAGQSDRGAQSVVMSGGYEDDEDHGEWFLYTGSGGRDLSGNKRTNDQSFDQVFSKSNRALSVSCLKGYPVRVVRSSKDVRSAYAPQEGLRYDGLYRIERCWRKIGLKGFLVCRYLFVRCDNEPAPWTSEDYGDRPRPLPEIAELKNATDVKERKTERPAWDWKEDENVWGWTKAPPSYNPSSARRKSVSSKEKELKTSTYLLKSLRTHDNVLSVGFGCGLCKNVLQRPLCAPCGHNFCQSCLIGHFAGHKDVRERGNGRRSLRVRKNQKLCPQCNKDIADFLEAPAVSRLLSE

SEQ ID NO: 45 - DNA, 2337 bp, Vitis vinifera
atggcgcacggtagcgacctcccgtgtgacggcgacggagtctgcatgatctgtcggaggaagccctccgacgacgagtctatcacgtgcaaaacatgtgccacgccctggcacgtcacgtgcctctcggtccgtcccgaaaccctagcggatgctctccagtggcagtgtcctgactgctctccggcggtcggatcggagggatccggtgacttgattgcagcgattcgggcgatcgagtcggatgggtcgttgaccgagcaggagaaggcgaagaggaggcaggagctgttgagcggaactaggaagaatggtgggagggatgttctcgatattctcgacgggagtttgaactgttccgtttgtatgcagcttctggagagaccggtaacgacaccatgtggtcacaacttttgccttaaatgctttgagaaatggattgggcaaggaaagcgcacatgtgcaaattgccgcaatgaaatcccacgcaaggttgcaagccaaccccgtattaattctgcccttgttgttgccataagaatggccaagatgtcaaaatctgtgacctcagtgggcacatcaaaggtttaccattttgtccacaaccagaaccgacctgacaaggcgtacaccactgagcgggcaaagaaggctgggaaggctaatgcttgtagtggaaagatctttgtcactgtccctcccgatcattttggaccaattcttgcagagaatgatccggaaagaaatcaaggtgtgctggttggtgaaagctgggaggacaggctggagtgcaggcaatggggagcccaccttccccatgttgcagggattgctgggcagtcagaagttggtgcccagtcagtggcactctctggaggctacgaagatgatgaggatcacggtgagtggttcctctatactggaagtggtgggagagaccttagtgggaataaacgcacaaacaaagaacagtcatttgatcagaagtttgagaagtcaaatgaagcactgaaagtaagttgcctcaaggggtatcctgttcgagttgtgagatcccacaaggaaaagcgttcttcttatgccccagaaacaggagtgcggtatgatggaatctacagaatagagaaatgttggcgaaaagttggaatacaaggttttagagtgtgcagatatctttttgttcgatgtgacaatgatcctgccccatggacaagtgatgaccatggagaccgtccaagaccattgcctgttatcaaggagttaaagaatgcaaccgatacaagtgaaaggaaaggaacaccatcttgggattatgatgagacagaaggtcgatggatgtggaagaaacctccaccagctagcaggaaacaaggggatggtgggggaactgtagtcaggaaaattcagcggcataaacaaattttgtctgccaaggaaaggcttctaaatgaattcagatgccttatgtgtcggaatgtaatggttcttccactcacgaccccctgtgcccataatttttgtaagtcttgcctggagggtgccttttctggccaaacttttgtgagacagaggacgtgtgaaggcagacggacgctacgagcacaaaagaatgtcatgaaatgcccttcttgccccaatgacatctctgacttccttcaaaatccacaggttaatagagagttgatggatgtgatagtatcactccagcgcaggactgtggagtcgggggaagatgctgaggagacgagtgaaggaaccgatggcatggatgaaaagcctgatgccattactggtgataaagaaattggcgagagttgtgaaattcaggaggattctgaagagactgatggcatgaacgagaagcaggattctgaagagactgatggcatggatgagaagcctgatgctgttgctgcagataaggaaactggtgatgaaagttgtgaaattcaggatgcttaccaaaaggatgtatctgatcctttggttgaaaccaaacccgagaagggtaacaagcaaaagaaagtattacccaggaagtcagatagtgtgaatggtaatgctgaagtgaagtctgatactttgaatgccgatgctgaagttaatgctgtcaaagggggggctcctgaaaataatgagctacaaacaagtccagttgacagcacaccaaagcgaaattacaagagaaggaagcctaatggagtgagcaacagccccgcatcaacgctgggttatggggtgaagactagaagcatgaaggccaaaatggcagctgctgctccaaatgatttgccatcaattacaatccaagttcagagtgatgatgattttgaatga

SEQ ID NO: 46 - protein, 778 aa, Vitis vinifera
MAHGSDLPCDGDGVCMICRRKPSDDESITCKTCATPWHVTCLSVRPETLADALQWQCPDCSPAVGSEGSGDLIAAIRAIESDGSLTEQEKAKRRQELLSGTRKNGGRDVLDILDGSLNCSVCMQLLERPVTTPCGHNFCLKCFEKWIGQGKRTCANCRNEIPRKVASQPRINSALVVAIRMAKMSKSVTSVGTSKVYHFVHNQNRPDKAYTTERAKKAGKANACSGKIFVTVPPDHFGPILAENDPERNQGVLVGESWEDRLECRQWGAHLPHVAGIAGQSEVGAQSVALSGGYEDDEDHGEWFLYTGSGGRDLSGNKRTNKEQSFDQKFEKSNEALKVSCLKGYPVRVVRSHKEKRSSYAPETGVRYDGIYRIEKCWRKVGIQGFRVCRYLFVRCDNDPAPWTSDDHGDRPRPLPVIKELKNATDTSERKGTPSWDYDETEGRWMWKKPPPASRKQGDGGGTVVRKIQRHKQILSAKERLLNEFRCLMCRNVMVLPLTTPCAHNFCKSCLEGAFSGQTFVRQRTCEGRRTLRAQKNVMKCPSCPNDISDFLQNPQVNRELMDVIVSLQRRTVESGEDAEETSEGTDGMDEKPDAITGDKEIGESCEIQEDSEETDGMNEKQDSEETDGMDEKPDAVAADKETGDESCEIQDAYQKDVSDPLVETKPEKGNKQKKVLPRKSDSVNGNAEVKSDTLNADAEVNAVKGGAPENNELQTSPVDSTPKRNYKRRKPNGVSNSPASTLGYGVKTRSMKAKMAAAAPNDLPSITIQVQSDDDFE

SEQ ID NO: 47 - DNA, 2280 bp, Zea mays
atgccggacctcccctgcgacggcgatggcgtctgcatggtctgccgcgtcacctccccgccggaggtcgacctcctccattgctccacctgcgccacgccctggcactccccgtgcctctccaaggctcccgccctggccgacgccgccagctggagctgccccgactgctccctggactccgccaccgtcgccgctccctcggcccctgctaacaccctcgttgccgccatccgcgccatcgagtccgacaacaccctctccgaccaggagaaggcgcgccgccgccaggccctcctcgccggcgacgcccccgacgtcgcggacgacgacgacgcggccgacgataccctcgaaatcgtcggcaaaaacttcagctgcgttttctgcatgaagctccctgaacgacccgtcaccacaccatgtgggcataacttctgcttgaaatgcttccagaagtggattcaaagcaagaagagaacctgtgggaaatgtcgggcaccgatccctgccaaaatggccgagcagccaagaatcaactctgcgctagttgaagttatcaggatggctaagatttcaaagaatcataactctgctggctcagctgttccataccactatatgcgaaatgatgataggcctgataaggcatttacaactgacagagctaagaaggctggaaaagcaaacgcatcgagtggccagatctttgtgaccattgcacctgatcattttggccctatacttgcagaaaatgacccccgcaggaatatgggtgttcgagtcggggaaacgtgggaggacaggcttgagtgcaggcaatggggtgctcactttcctcatgtggctggtattgccggccagtctacgcatggggctcaatcagtagccctctccggagggtatgaagatgatgaagaccatggggagtggtttctttacactggaagcggcgggagggacctaagtggtaacaagcgaacaaacaaggagcagtcatctgatcagaaatttgagaagctgaatgctgctttacgcattagttgcttgaagggctaccctgttagggttgtacggtcgcacaaagagaagcgatcctcgtatgctcctgaatctggtgtgaggtatgatggggtttacagaattgagaagtgttggaggaagattggtattcagggtaagttcaaggtctgcaggtatctctttgtacgctgtgacaatgaaccagctccttggaccagcgatgatcatggtgaccgtccgagacccttgccaaagataaaggagctacaaggtgcaactgatataacagagaggaaagggcgtccttcatgggattatgatgagaaagatggctggaaatggatggtgcctccgccagtcagcaagaggcctgttctctctggtgatcctgagaccgacaagctaatccggaaagcaacaaagcgtgctcatttatctgttgctgaaaggctgcttaaagagtttggttgttctatctgccgggcggtgattaaagagccacttacaacaccatgtgctcacaacttctgcaagacttgtttgcttggtgcatatgatagccagtcctctatgagggaaagaagccgtggtggtcggactctaagggcacagaagattgtgaagacgtgcccttcctgccctactgacatctgcgacttcttagaaaatccccagatcaaccgagaaatgatggagttgattgagtccttgcaacgcaaggctgttgaagaaggcaagatggctgcaggtgatgccgaggaatctggtgatggtgactcggaggaaaatggtggtgctttggtgaagggagaagatgatagcaatttgaacgaggaaggtcaagacggtgtagacgctgatggttctgtgaagattgtggttgaaatggagggtgcaaaagatgataaaaagtcaaagatgggcgcggctgaagtggtggatgtgttagttgaagatgctgctgcgaaacagccgaagaagcgcacggctgatgaagatgctgctgcgaaacagacgaagcacaaggctgatgctgagactggtggcaagagggtgaagagcagtgctgcagtggaagaggttgatgtgtgcgtcactcctatgaaacggaccaggaagagtggtgatatgcatgatgacggcaacggcagccctgctgtgagcagcggccgcagggtgactcggagcagtgtgaatgccacgggagctgatgacagtccagcgaggaggaccagaagccgtggcagagcatgctga

SEQ ID NO: 48 - protein, 759 aa, Zea mays
MPDLPCDGDGVCMVCRVTSPPEVDLLHCSTCATPWHSPCLSKAPALADAASWSCPDCSLDSATVAAPSAPANTLVAAIRAIESDNTLSDQEKARRRQALLAGDAPDVADDDDAADDTLEIVGKNFSCVFCMKLPERPVTTPCGHNFCLKCFQKWIQSKKRTCGKCRAPIPAKMAEQPRINSALVEVIRMAKISKNHNSAGSAVPYHYMRNDDRPDKAFTTDRAKKAGKANASSGQIFVTIAPDHFGPILAENDPRRNMGVRVGETWEDRLECRQWGAHFPHVAGIAGQSTHGAQSVALSGGYEDDEDHGEWFLYTGSGGRDLSGNKRTNKEQSSDQKFEKLNAALRISCLKGYPVRVVRSHKEKRSSYAPESGVRYDGVYRIEKCWRKIGIQGKFKVCRYLFVRCDNEPAPWTSDDHGDRPRPLPKIKELQGATDITERKGRPSWDYDEKDGWKWMVPPPVSKRPVLSGDPETDKLIRKATKRAHLSVAERLLKEFGCSICRAVIKEPLTTPCAHNFCKTCLLGAYDSQSSMRERSRGGRTLRAQKIVKTCPSCPTDICDFLENPQINREMMELIESLQRKAVEEGKMAAGDAEESGDGDSEENGGALVKGEDDSNLNEEGQDGVDADGSVKIVVEMEGAKDDKKSKMGAAEVVDVLVEDAAAKQPKKRTADEDAAAKQTKHKADAETGGKRVKSSAAVEEVDVCVTPMKRTRKSGDMHDDGNGSPAVSSGRRVTRSSVNATGADDSPARRTRSRGRAC

SEQ ID NO: 49 - DNA, 2094 bp, Zea mays
atggcggccgatcttccctgcgacgatgctggcgtctgcatggtctgcggtgtggccgcaccgtccgaggtagacctgctacggtgctccacctgcgccaccccgtggcactccccatgcctctcgaatccacccgcgctgtctgaagctgcgatctggagctgccccgactgctccggcgatcctgtagcccccgcggcccctgcggcaggaggcgagctcgtcgccgccgtccgcgcgatcgaggccgacaccaccctctccgatgcagagaaggcacgccgccgccaaaatattctggcaggccgatctgctgcttctgcccccgacgatgatgtcgacgacagcgcagaggacgacgtcctcaatatcttcggcagaagtttcagctgcgccttctgcatgaagctgctggatcgccctgtcacaacaccatgtggccacaatttctgcctgaagtgcttcaaccggtggacacataatggagcaagcgcatgtggaaaatgccgtagaccgatcccctacaaaatggtgcagcaaccacgaatcaactctgcaatagtgagtgccatccgtgcggccaggatgtcaaagaacactaatccagcagcagccggctcatcagcaggctcgcatcactatatacagaatgttgataggcccgacagggcatacacaactgaaagggccaagcgaggcggaaaggcaaacgcttcgagcggccagatctttgtgacgactgcgccggatcattttgggccaatccttgccgaacatgaccccaggaggaacaccggtgtgcgagttggagaaacatgggaagatagacttgagtgtaggcaatggggtgctcatctgcctcacatagccggaattgctgggcagagcagatttggtgctcaatcagtcgccctgtccggaggctacgaagatgatgaagaccacggggagtggttcctttataccggaagtggcgggagggatctaagtggaaacaagcgaacaaataaggagcaaggttttgatcaaacatttgtgaagatgaatgaggctctccgacaaagctgcttgaggggttaccctgttcgggttgtacggtcccataaagagaaacgctcttcgtacgctcctgaattgggtgtgaggtatgatggaatttacaggattgagaagtgttggaggaagattggtgttcagggaacgttcaaagtctgcaggtatctgtttgtacgctgtgacaatgaaccagcaccttggaccagtgatgatcatggtgaccgtccaaggccattgcccaacattcccgagttaaaagatgcaactgatataaatgagagagatgagcgtccttcatggggctacgatgagaaggaaggccgctggaaatggatgtacgagccgccaacgagcaggaaacctgttcgcactgggcttcgtcctaagaccggcaagcaagcccggaaaagagcaaggagtgatgagatgcctaacgaccctgaaaaactcctgaatgagtttagctgttgtatctgcttccaagtgatggcagagccactcactgctccctgtggtgacagcttctgcaaggcttgtctgctgggggcatatgataaccagtcctccgtgagagaaagaagccatggcggccgcactctgagggctcagaagatcgtcaagagatgcccatcctgtgcaactgacatcagcgacttcctagcggatccacagatcaaccgagacataatggatgtgattgagtcactgcaacggaaaggcgacaccaccaccaaggacgacgctgcttcatatggatatggtgctgacaaggccgaggaattccgtggtggtgacctgcaagaggaagctgatccggagatggatgctgaggataactctgaatctgacacggatgctgatgcttcttgtggcagaactgtggttgggatcaaggatcaggaaggccagcagctgcagccccagaagcgcaagggtggcgttgccattattggcactgatgatggtcctagcaaaaggattacagcaagtgctgatgtggaacagaaaggttggaataccagtactgtcgtcgtttag

SEQ ID NO: 50 - protein, 697 aa, Zea mays
MAADLPCDDAGVCMVCGVAAPSEVDLLRCSTCATPWHSPCLSNPPALSEAAIWSCPDCSGDPVAPAAPAAGGELVAAVRAIEADTTLSDAEKARRRQNILAGRSAASAPDDDVDDSAEDDVLNIFGRSFSCAFCMKLLDRPVTTPCGHNFCLKCFNRWTHNGASACGKCRRPIPYKMVQQPRINSAIVSAIRAARMSKNTNPAAAGSSAGSHHYIQNVDRPDRAYTTERAKRGGKANASSGQIFVTTAPDHFGPILAEHDPRRNTGVRVGETWEDRLECRQWGAHLPHIAGIAGQSRFGAQSVALSGGYEDDEDHGEWFLYTGSGGRDLSGNKRTNKEQGFDQTFVKMNEALRQSCLRGYPVRVVRSHKEKRSSYAPELGVRYDGIYRIEKCWRKIGVQGTFKVCRYLFVRCDNEPAPWTSDDHGDRPRPLPNIPELKDATDINERDERPSWGYDEKEGRWKWMYEPPTSRKPVRTGLRPKTGKQARKRARSDEMPNDPEKLLNEFSCCICFQVMAEPLTAPCGDSFCKACLLGAYDNQSSVRERSHGGRTLRAQKIVKRCPSCATDISDFLADPQINRDIMDVIESLQRKGDTTTKDDAASYGYGADKAEEFRGGDLQEEADPEMDAEDNSESDTDADASCGRTVVGIKDQEGQQLQPQKRKGGVAIIGTDDGPSKRITASADVEQKGWNTSTVVV

SEQ ID NO: 51 - DNA, 2424 bp, Zea mays
atggggggaaactggtctgggaaggagagtggtggccgtgcctgccctccccccgcccggccagcggcaaacccaaaatttgaacccgccgcttcgactgactactaccccaccatccaaaaccccactccggcctccgccgtcatttcctctccccgccaatccgccaccatttccagttccgaccgacctcgaaaccctagcccccagaccatcccactcgcaaccgccatgccggacctcccctgcgacggcgatggcgtctgtatggtctgccgcgtcgcatccccgccggaggtcgacctcctcacctgctccacctgcaccacgccctggcactctccgtgcctctccaagccccccgccctcgccgacgccgccagctggagctgccccgactgctcccccgactccgctgccgtcgccgctccctcgggccccgccaacaccctggtcgccgccatccgcgccatcgaggctgaccacacactctccgaccaggagaaggcgcgccgccgccaggccctcctcaccggcgacgcccccgacggcgcggacgacgatgacgacgaagcgtccgacgatgcccttgagatcgtcggcaagaacttcagctgcgttttctgcatgaagctccctgaacgacccgtcacgacaccctgtggccataacttctgcttgaaatgcttccagaagtggattcaaaatcagaagaggacgtgtgggaaatgtcgggcgcagatcccggccaaaatggctgagcagccaagaatcaactccgcactagtcgaagttatcaggatggctaagatttcaaagaatcctaactctgctggctcagcagttccatatcactatctacgaaatgatgataggcctgataaggcctttacaactgacagggctaagagggctggaaaagcaaacgcatcaagtggccagatctttgtgactattgcacctgatcattttggccccattcttgcagaaaatgacccccgcaggaatatgggtgttcgagtcggggaaacatgggaagaccgacttgagtgcaggcaatggggtgctcactttcctcatgtggctggcattgctggccagtctacgcatggtgctcaatcagtagccctctcaggagggtatgaagatgatgaagaccatggagagtggtttctttacaccggaagcggtgggagggatctaagtggtaacaagcggacaaacaaggaacagtcatctgatcagaaatttgagaagctgaatgctgctttacgcattagttgcttaaagggctaccctgttagggttgtacggtcgcacaaagagaagcggtcctcatatgctcctgaatctggtgtgaggtacgacggggtttacaggattgagaagtgctggaggaagattggtattcagggtaagttcaaggtctgcaggtatctctttgtacgctgtgacaatgaaccagctccttggaccagtgacgatcacggtgaccgtccaagaccattgccaaagataaaggagctgcaaggtgcaactgatataacagagaggaaagggcgcccttcatgggattatgatgataaagatggctggaaatgggtggtgcctccgccagtcagcaggaagcctgttctatctggggatcctgagaccgacaagcaaatccgtagagcaacaaagcgtgttcatttgtctgttgctgaaaggctgcttaaagaatttgcttgttcgatatgccgggcggtgattaaagaaccacttacgactccatgtgcccacaacttttgcaagacttgtttgcttggggcatatgatagccagtcttctataagggaaagaagccgtggtggtcggactctaagggcacagaagattgtgaagacgtgcccttcttgcccaactgacatctgtgattttttagagaatccccagatcaaccgagaaatgatggagctgattgagactttgcaacgcaaggctgttgaagaagccaagatgacttcagatgatgctgaggaatgtggtgatggtgattcggaggaaaatgatggtgatttggtgaagggagaggatgttagtggtttgaatgagggagagcaagacagtgcagacgctgatgctaatgttgaaggttctgtgaagattgtggttgaaatcaaggaggaaggaaaagatgataaaaggtcaaagatgggcgcgactgaagtggtggatgtgttagttgatgaagatgctgtgaagcagacgaaaaagcgcaaggttgatgctgaggctggcaccaacggtggcaagaggatgaagagcagtagtaccgtggaagaggttgctgtgtgcgtcactcctgtgaaacggagcaggaagagtggtgatatggatgatgagcgcaacggcagtcctgctgtgagcagcggccgctggtga

SEQ ID NO: 52 - protein, 807 aa, Zea mays
MGGNWSGKESGGRACPPPARPAANPKFEPAASTDYYPTIQNPTPASAVISSPRQSATISSSDRPRNPSPQTIPLATAMPDLPCDGDGVCMVCRVASPPEVDLLTCSTCTTPWHSPCLSKPPALADAASWSCPDCSPDSAAVAAPSGPANTLVAAIRAIEADHTLSDQEKARRRQALLTGDAPDGADDDDDEASDDALEIVGKNFSCVFCMKLPERPVTTPCGHNFCLKCFQKWIQNQKRTCGKCRAQIPAKMAEQPRINSALVEVIRMAKISKNPNSAGSAVPYHYLRNDDRPDKAFTTDRAKRAGKANASSGQIFVTIAPDHFGPILAENDPRRNMGVRVGETWEDRLECRQWGAHFPHVAGIAGQSTHGAQSVALSGGYEDDEDHGEWFLYTGSGGRDLSGNKRTNKEQSSDQKFEKLNAALRISCLKGYPVRVVRSHKEKRSSYAPESGVRYDGVYRIEKCWRKIGIQGKFKVCRYLFVRCDNEPAPWTSDDHGDRPRPLPKIKELQGATDITERKGRPSWDYDDKDGWKWVVPPPVSRKPVLSGDPETDKQIRRATKRVHLSVAERLLKEFACSICRAVIKEPLTTPCAHNFCKTCLLGAYDSQSSIRERSRGGRTLRAQKIVKTCPSCPTDICDFLENPQINREMMELIETLQRKAVEEAKMTSDDAEECGDGDSEENDGDLVKGEDVSGLNEGEQDSADADANVEGSVKIVVEIKEEGKDDKRSKMGATEVVDVLVDEDAVKQTKKRKVDAEAGTNGGKRMKSSSTVEEVAVCVTPVKRSRKSGDMDDERNGSPAVSSGRW

SEQ ID NO: 53 - protein, 50 aa, Artificial sequence
  motif 1
  VARIANT (7)..(7): / replace = "Phe"
  VARIANT (18)..(18): / replace = "Ala"
  VARIANT (19)..(19): / replace = "His" / replace = "Val"
  VARIANT (31)..(31): / replace = "Glu" / replace = "Asp"
RQWGAHLPHVAGIAGQSTYGAQSVALSGGYIDDEDHGEWFLYTGSGGRDL

SEQ ID NO: 54 - protein, 37 aa, Artificial sequence
  motif 2
  VARIANT (2)..(2): / replace = "Glu"
  VARIANT (3)..(3): / replace = "Asn"
  VARIANT (4)..(4): / replace = "Leu"
  VARIANT (6)..(6): / replace = "Ala"
  VARIANT (10)..(10): / replace = "Val"
  VARIANT (13)..(13): / replace = "Lys"
  VARIANT (30)..(30): / replace = "Ser"
  VARIANT (35)..(35): / replace = "Glu" / replace = "Ser"
FDKMNEALRLSCLKGYPVRVVRSHKEKRSAYAPETGV

SEQ ID NO: 55 - protein, 50 aa, Artificial sequence
  motif 3
  VARIANT (2)..(2): / replace = "Phe"
  VARIANT (9)..(9): / replace = "Arg"
  VARIANT (10)..(10): / replace = "Thr"
  VARIANT (16)..(16): / replace = "Ser" / replace = "Ala"
  VARIANT (19)..(19): / replace = "Gln"
  VARIANT (24)..(24): / replace = "Ile"
  VARIANT (25)..(25): / replace = "Pro"
  VARIANT (33)..(33): / replace = "Leu"
  VARIANT (39)..(39): / replace = "Thr"
  VARIANT (42)..(42): / replace = "Gln"
  VARIANT (48)..(48): / replace = "Asp"
  VARIANT (49)..(49): / replace = "Ser" / replace = "Thr"
AYTTERAKKAGKANACSGKIFVTVAPDHFGPIPAENDPERNMGVLVGEIW

SEQ ID NO: 56 - DNA, 4827 bp, Artificial sequence
  expression cassette
aatccgaaaagtttctgcaccgttttcaccccctaactaacaatatagggaacgtgtgctaaatataaaatgagaccttatatatgtagcgctgataactagaactatgcaagaaaaactcatccacctactttagtggcaatcgggctaaataaaaaagagtcgctacactagtttcgttttccttagtaattaagtgggaaaatgaaatcattattgcttagaatatacgttcacatctctgtcatgaagttaaattattcgaggtagccataattgtcatcaaactcttcttgaataaaaaaatctttctagctgaactcaatgggtaaagagagagattttttttaaaaaaatagaatgaagatattctgaacgtattggcaaagatttaaacatataattatataattttatagtttgtgcattcgtcatatcgcacatcattaaggacatgtcttactccatcccaatttttatttagtaattaaagacaattgacttatttttattatttatcttttttcgattagatgcaaggtacttacgcacacactttgtgctcatgtgcatgtgtgagtgcacctcctcaatacacgttcaactagcaacacatctctaatatcactcgcctatttaatacatttaggtagcaatatctgaattcaagcactccaccatcaccagaccacttttaataatatctaaaatacaaaaaataattttacagaatagcatgaaaagtatgaaacgaactatttaggtttttcacatacaaaaaaaaaaagaattttgctcgtgcgcgagcgccaatctcccatattgggcacacaggcaacaacagagtggctgcccacagaacaacccacaaaaaacgatgatctaacggaggacagcaagtccgcaacaaccttttaacagcaggctttgcggccaggagagaggaggagaggcaaagaaaaccaagcatcctcctcctcccatctataaattcctccccccttttcccctctctatataggaggcatccaagccaagaagagggagagcaccaaggacacgcgactagcagaagccgagcgaccgccttcttcgatccatatcttccggtcgagttcttggtcgatctcttccctcctccacctcctcctcacagggtatgtgcccttcggttgttcttggatttattgttctaggttgtgtagtacgggcgttgatgttaggaaaggggatctgtatctgtgatgattcctgttcttggatttgggatagaggggttcttgatgttgcatgttatcggttcggtttgattagtagtatggttttcaatcgtctggagagctctatggaaatgaaatggtttagggtacggaatcttgcgattttgtgagtaccttttgtttgaggtaaaatcagagcaccggtgattttgcttggtgtaataaaagtacggttgtttggtcctcgattctggtagtgatgcttctcgatttgacgaagctatcctttgtttattccctattgaacaaaaataatccaactttgaagacggtcccgttgatgagattgaatgattgattcttaagcctgtccaaaatttcgcagctggcttgtttagatacagtagtccccatcacgaaattcatggaaacagttataatcctcaggaacaggggattccctgttcttccgatttgctttagtcccagaattttttttcccaaatatcttaaaaagtcactttctggttcagttcaatgaattgattgctacaaataatgcttttatagcgttatcctagctgtagttcagttaataggtaatacccctatagtttagtcaggagaagaacttatccgatttctgatctccatttttaattatatgaaatgaactgtagcataagcagtattcatttggattattttttttattagctctcaccccttcattattctgagctgaaagtctggcatgaactgtcctcaattttgttttcaaattcacatcgattatctatgcattatcctcttgtatctacctgtagaagtttctttttggttattccttgactgcttgattacagaaagaaatttatgaagctgtaatcgggatagttatactgcttgttcttatgattcatttcctttgtgcagttcttggtgtagcttgccactttcaccagcaaagttcatttaaatcaactagggatatcacaagtttgtacaaaaaagcaggcttaaacaatggaactcccgtgcgacggagccggcatttgcatggtctgcaaaaacaagccaccaagtgaagagaccctcgcgtgcaaaacatgtgtcaccccctggcacgccacgtgtctcgtctccccccctcaggcgctttctgatacgctgcaatgggagtgccctgactgctccatgattcatccgccgtccacttccgccttcgcctccggaagatcggaggattccggtgatctcatcgcgtcgattcggaagatcgaggatgacaaatcgttgactgaacaggagaaggcaaagaaacgtcaggagctgttgaatggcgccgccgctggtccgtcctcattggacggcgaggaaaagaaagagaagaatgacgtccttgatatactcgataaggagttgacttgctctttctgcatgcaaatgcttgatagaccggttacaactccatgcggtcataacttttgcttgaagtgcttccagagatggattggacaagggaaacgtacatgtgcatattgccgtgtacaaatcccacccaagatagcaagccagcctcgtatcaattctacacttgttattgccatacgtatggcaaggatgtcaagatccagcaatgctgggggtgctgcgaaggtatatcattttgtccacaaccaaaacaggccagacaaagcatacacaacagagcgggcaaagaaagctggcaaggctaatgcttgtagtgggaagatctttgtcacagttgctcctgatcactttgggccaatccctgcagagaacgacccagaaagaaatatgggtgttttggtgggagagatatgggaggataggctggcatgcaggcaatggggtgcccatctcccccatgttgcaggaattgctggtcagtctacttatggcgcgcaatcggtggctctttctggaggttatattgatgacgaggaccatggtgaatggtttctttacactgggagtggaggaagggacctgagcggcaataaacgcacaaacaaggaccagtcctttgaccaaaagtttgacaagatgaacgaggcactacgattaagctgcctaaagggctatcctgtaagagtggttaggtctcacaaagagaagcgatcatcatatgctccagaaacaggtgtgcgttatgatggggtttatagaattgagaagtgttggcgtaagaatggaatacagggctttaaagtttgcaggtatctctttgtcagatgcgacaacgagcctgctccatggacgagtgatgttcaaggggaccgtccgaggcctctgcctgtcatcaaggaattaaagaatgcaattgatataactgaaaggaaggggtccccttcctgggactatgaggatgaaaaaagttgctggatgtggaaaaagccacctccagccagtaaaaagagagttgctgatagtgtaggtccagaagatggcaaagtgattaggataatcaagcgacaaaaagcaaatatatctgttagagaaaaacttctgaaagagtttagttgtcaaatttgccggaaggtgatggccaatccaatcactaccccatgtgcccataatttctgcaaagcatgtcttgagggtgcctttgctggccaaagtctcactagacaaagaggtcaaggaagacggacattaagagcgcaaaagaatgttatgaaatgtccatcttgtactattgacatagctgactttcttcagaacccacaggtgaatcgggagttgatgggtgtcatagaatcactacaacaacaagctgagcaggaaaaactggacaacaattcagaagagtgtagtgaagagagtgatgccactgagcaacaacgagatttggttgctgatgaccaaattgccgaagagccaaaggatgaatcccaaaatgcacagaagcagaaaaaagaaactgatgatgatgacattatggatccatcatcaaatgtgcagacaatgagtccagggaaggagcaagaagccccaaccactaccactactgatagagccagtcaataacgtatgctggagcacccagctttcttgtacaaagtggtgatatcacaagcccgggcggtcttctagggataacagggtaattatatccctctagatcacaagcccgggcggtcttctacgatgattgagtaataatgtgtcacgcatcaccatgggtggcagtgtcagtgtgagcaatgacctgaatgaacaattgaaatgaaaagaaaaaaagtactccatctgttccaaattaaaattcattttaaccttttaataggtttatacaataattgatatatgttttctgtatatgtctaatttgttatcatccgggcggtcttctagggataacagggtaattatatccctctagacaacacacaacaaataagagaaaaaacaaataatattaatttgagaatgaacaaaaggaccatatcattcattaactcttctccatccatttccatttcacagttcgatagcgaaaaccgaataaaaaacacagtaaattacaagcacaacaaatggtacaagaaaaacagttttcccaatgccataatactcgaac

SEQ ID NO: 57 - DNA, 2194 bp, Oryza sativa
aatccgaaaagtttctgcaccgttttcaccccctaactaacaatatagggaacgtgtgctaaatataaaatgagaccttatatatgtagcgctgataactagaactatgcaagaaaaactcatccacctactttagtggcaatcgggctaaataaaaaagagtcgctacactagtttcgttttccttagtaattaagtgggaaaatgaaatcattattgcttagaatatacgttcacatctctgtcatgaagttaaattattcgaggtagccataattgtcatcaaactcttcttgaataaaaaaatctttctagctgaactcaatgggtaaagagagagattttttttaaaaaaatagaatgaagatattctgaacgtattggcaaagatttaaacatataattatataattttatagtttgtgcattcgtcatatcgcacatcattaaggacatgtcttactccatcccaatttttatttagtaattaaagacaattgacttatttttattatttatcttttttcgattagatgcaaggtacttacgcacacactttgtgctcatgtgcatgtgtgagtgcacctcctcaatacacgttcaactagcaacacatctctaatatcactcgcctatttaatacatttaggtagcaatatctgaattcaagcactccaccatcaccagaccacttttaataatatctaaaatacaaaaaataattttacagaatagcatgaaaagtatgaaacgaactatttaggtttttcacatacaaaaaaaaaaagaattttgctcgtgcgcgagcgccaatctcccatattgggcacacaggcaacaacagagtggctgcccacagaacaacccacaaaaaacgatgatctaacggaggacagcaagtccgcaacaaccttttaacagcaggctttgcggccaggagagaggaggagaggcaaagaaaaccaagcatcctccttctcccatctataaattcctccccccttttcccctctctatataggaggcatccaagccaagaagagggagagcaccaaggacacgcgactagcagaagccgagcgaccgccttctcgatccatatcttccggtcgagttcttggtcgatctcttccctcctccacctcctcctcacagggtatgtgcctcccttcggttgttcttggatttattgttctaggttgtgtagtacgggcgttgatgttaggaaaggggatctgtatctgtgatgattcctgttcttggatttgggatagaggggttcttgatgttgcatgttatcggttcggtttgattagtagtatggttttcaatcgtctggagagctctatggaaatgaaatggtttagggatcggaatcttgcgattttgtgagtaccttttgtttgaggtaaaatcagagcaccggtgattttgcttggtgtaataaagtacggttgtttggtcctcgattctggtagtgatgcttctcgatttgacgaagctatcctttgtttattccctattgaacaaaaataatccaactttgaagacggtcccgttgatgagattgaatgattgattcttaagcctgtccaaaatttcgcagctggcttgtttagatacagtagtccccatcacgaaattcatggaaacagttataatcctcaggaacaggggattccctgttcttccgatttgctttagtcccagaattttttttcccaaatatcttaaaaagtcactttctggttcagttcaatgaattgattgctacaaataatgcttttatagcgttatcctagctgtagttcagttaataggtaatacccctatagtttagtcaggagaagaacttatccgatttctgatctccatttttaattatatgaaatgaactgtagcataagcagtattcatttggattattttttttattagctctcaccccttcattattctgagctgaaagtctggcatgaactgtcctcaattttgttttcaaattcacatcgattatctatgcattatcctcttgtatctacctgtagaagtttctttttggttattccttgactgcttgattacagaaagaaatttatgaagctgtaatcgggatagttatactgcttgttcttatgattcatttcctttgtgcagttcttggtgtagcttgccactttcaccagcaaagttc

SEQ ID NO: 58 - DNA, 51 bp, Artificial sequence
  primer: prm15909
ggggacaagtttgtacaaaaaagcaggcttaaacaatggaactcccgtgcg

SEQ ID NO: 59 - DNA, 50 bp, Artificial sequence
  primer: prm15910
ggggaccactttgtacaagaaagctgggtgctccagcatacgttattgac

SEQ ID NO: 60 - DNA, 1329 bp, Arabidopsis thaliana
atgttgaaaatcaaaagagttccgaccgttgtttcgaactaccagaaggacgatggagcggaggatcccgtcggctgtggacggaattgcctcggcgcttgttgccttaacggggctaggcttccattgtatgcatgtaagaatctggtaaaatccggagagaagcttgtaatcagtcatgaggctatagagcctcctgtagcttttctcgagtcccttgttctcggagggtgggaggataggttccaaagaggactttttcgctatgatgtcactgcctgcgaaaccaaagttatcccggggaagtatggtttcgttgctcagcttaacgagggtcgtcacttgaagaagaggccaactgagttccgtgtagataaggtgttgcagtcttttgatggcagcaaattcaacttcactaaagttggccaagaagagttgctcttccagtttgaagctggtgaagatgcccaagttcagttcttcccttgcatgcctattgaccctgagaattctcccagtgttgttgccatcaatgttagtccgatagagtatggccatgtgctgctgattcctcgtgttcttgactgcttgcctcaaaggatcgatcacaaaagccttttgcttgcagttcacatggctgctgaggctgctaatccatacttcagactcggttacaacagcttgggtgcttttgccactatcaatcatctccactttcaggcttattacttggccatgcctttcccactggagaaagctcctaccaagaagataactaccactgttagtggtgtcaaaatctcagagcttctaagttaccctgtgagaagtcttctctttgaaggtggaagctctatgcaagaactatctgatactgtttcagactgctgtgtttgccttcaaaacaacaacattcctttcaacattctcatctctgattgtggaaggcagatcttcttaatgccacagtgttacgcagagaaacaggctctaggtgaagtgagcccggaggtattggaaacacaagtgaacccagccgtgtgggagataagtggtcacatggtactgaagaggaaagaggattacgaaggtgcttcagaggataacgcgtggaggctccttgcggaagcttctctgtcggaggaaaggtttaaggaggttactgctctcgcctttgaagccataggttgtagtaaccaagaggaggatcttgaaggaaccatagttcatcagcaaaactctagtggcaatgttaaccagaaaagcaacagaacccttggaggtccgatcacaaatgggacggccgccgagtgccttgtccttcagtga

SEQ ID NO: 61 - protein, 442 aa, Arabidopsis thaliana
MLKIKRVPTVVSNYQKDDGAEDPVGCGRNCLGACCLNGARLPLYACKNLVKSGEKLVISHEAIEPPVAFLESLVLGGWEDRFQRGLFRYDVTACETKVIPGKYGFVAQLNEGRHLKKRPTEFRVDKVLQSFDGSKFNFTKVGQEELLFQFEAGEDAQVQFFPCMPIDPENSPSVVAINVSPIEYGHVLLIPRVLDCLPQRIDHKSLLLAVHMAAEAANPYFRLGYNSLGAFATINHLHFQAYYLAMPFPLEKAPTKKITTTVSGVKISELLSYPVRSLLFEGGSSMQELSDTVSDCCVCLQNNNIPFNILISDCGRQIFLMPQCYAEKQALGEVSPEVLETQVNPAVWEISGHMVLKRKEDYEGASEDNAWRLLAEASLSEERFKEVTALAFEAIGCSNQEEDLEGTIVHQQNSSGNVNQKSNRTLGGPITNGTAAECLVLQ

SEQ ID NO: 62 - DNA, 1296 bp, Triticum aestivum
atggagatgaagctgacgattaagagggttccgacggtgctgtccaactaccaggaagaaggaggcgggggctgcggcaggaactgcctcggggattgctgcttgcctgcttccaagctccccctctatgctttcaaggccgacccaaagaagcctgcgcaggatgatgagctccctaccgagttcttcctaaattctctcctccttgcacagtgggaggacagggtggcccgaggcctattcagatatgacgtaacagcctgcgagaccaaggtgattcctggcgagcttgggtttgttgcacagcttaacgaaggccgccacctcaagaagcgcccgaccgagttccgtgttgaccgtgtgctccagccattcgattctgccaagttcaacttcaccaaggttggccaggaggaggttctctttcgctttgagaaaggtggtggcgacagcagctatttccttgaaaatgccccaagcactgagggtgaccatgctcccagcgttgttgcaatcaatgtgagccctattgagtacggtcatgtgcttctcattccacgtgtccttgaccgcctgcctcagcaaattgatcctgaaagcttcctgcttgcactacacatggcagctgaggctgcaagcccatactttaggcttggttacaacagcttgggtgcctttgccaccatcaatcatctccacttccaggcatactacctgtcagtaccttttcctgttgagaaggcgcctaccaagaagatcccccttgccaagtgtgcgctgaatagtggagtgaaggtgtcaaaactgacaaatttccccgtgagaggtctggtgtttgagagagggaacacactgaaggatttggctgatgtggttaccaacgcttgcatttggctccaggagaacaatgttcctttcaacgtcctcatctctgattccggtagaaggatcttcgtttttcctcagtgctatgccgagaagcaggctctcggtgaagtgagccaggatctgctagacacgcaggtgaaccctgcagtatgggagatcagtggccacattgttctgaaacggaggacggacttcgaggaggcttcagaagcatcagcctggaggcttctcgctgaggtgtctctgtcggaggagcgatttgaggaggtgaaggcatgtatctttgaggccaccggcctcactgaatctgacgaggaagaggaatccagtgagtctccttatgcatcgtcatcctccgtcccacgagcctcttcacacatgtcggaaggttgccttgtccttcagtga

SEQ ID NO: 63 - protein, 431 aa, Triticum aestivum
MEMKLTIKRVPTVLSNYQEEGGGGCGRNCLGDCCLPASKLPLYAFKADPKKPAQDDELPTEFFLNSLLLAQWEDRVARGLFRYDVTACETKVIPGELGFVAQLNEGRHLKKRPTEFRVDRVLQPFDSAKFNFTKVGQEEVLFRFEKGGGDSSYFLENAPSTEGDHAPSVVAINVSPIEYGHVLLIPRVLDRLPQQIDPESFLLALHMAAEAASPYFRLGYNSLGAFATINHLHFQAYYLSVPFPVEKAPTKKIPLAKCALNSGVKVSKLTNFPVRGLVFERGNTLKDLADVVTNACIWLQENNVPFNVLISDSGRRIFVFPQCYAEKQALGEVSQDLLDTQVNPAVWEISGHIVLKRRTDFEEASEASAWRLLAEVSLSEERFEEVKACIFEATGLTESDEEEESSESPYASSSSVPRASSHMSEGCLVLQ

SEQ ID NO: 64 - DNA, 1290 bp, Arabidopsis lyrata
atgttgttgaagatcaaaagagttccaacagttgtgtcgaattatcagaaagatgaaacggtggaagaaggtggatgtggtcggaattgcttgagcaagtgttgtatcaatggggcaagacttcctttatatacttgcaagaatcttgatacattcgtcggagagaagttagaatctccggtgatgttcctcgaatctctagttcttggagagtgggaagatcgtttccaaagaggactttttcgctacgatgtcaccgcctgcgaaaccaaggttataccggggaagtacggtttcattgcgcagctgaatgaaggtcgtcttctcaagaagagaccaaccgagttccgtgttgacaaagttcttcaaccatttgatggaaacaagttcaatttcactaaagttggtcaagaagagttgctttttcagtttgaagctagcgataacgacgatgatagtcaaatccagttcttgccgagtatccctctagacgcggataattctccaagcgtcgttgcaatcaatgtgagtccgattgagtatggacatgtgttgctgattcctcgtgttcttgattgcttgcctcaaaggattgatcacaaaagccttttgcttgctcttcaaatggcggctgaagcggctaatccgtatttccgacttggatacaacagtttaggggcttttgctaccatcaaccatcttcactttcaggcttactatttggcaatgcaattcccgattgagaaagcttcttccttgaagatcactaccactaataatggcgtcaaaatctcaaaactcttgaactaccctgtgagaggtcttctatttgaaggtggaaactccattaaagatctctctgatactgtatcagatgcatccgtttgtcttcagaacaacaacattcctttcaacattctcatctctgattctggaaaacaaatcttccttctccctcagtgttacgcagagaaacaggctttaggggaagttagctcaaagctattggatacgcaagtgaatccagcggtttgggagatgagtggacacatggtgttgaagaggaaagaagactacgaaggagcttcagaagagaaggcatggaggttactagctgaagtttctttatcagaggagagattcaaagaagttaacactatgatatttgaggccatcggatttagtagtcacgaagaagaagaggtgcttgaagagcagagttcgatgaatggtagcagcttcataagagtgcattgtccttcagtgaaagaagaggctgtctctaattga

SEQ ID NO: 65 - protein, 429 aa, Arabidopsis lyrata
MLLKIKRVPTVVSNYQKDETVEEGGCGRNCLSKCCINGARLPLYTCKNLDTFVGEKLESPVMFLESLVLGEWEDRFQRGLFRYDVTACETKVIPGKYGFIAQLNEGRLLKKRPTEFRVDKVLQPFDGNKFNFTKVGQEELLFQFEASDNDDDSQIQFLPSIPLDADNSPSVVAINVSPIEYGHVLLIPRVLDCLPQRIDHKSLLLALQMAAEAANPYFRLGYNSLGAFATINHLHFQAYYLAMQFPIEKASSLKITTTNNGVKISKLLNYPVRGLLFEGGNSIKDLSDTVSDASVCLQNNNIPFNILISDSGKQIFLLPQCYAEKQALGEVSSKLLDTQVNPAVWEMSGHMVLKRKEDYEGASEEKAWRLLAEVSLSEERFKEVNTMIFEAIGFSSHEEEEVLEEQSSMNGSSFIRVHCPSVKEEAVSN

SEQ ID NO: 66 - DNA, 1335 bp, Arabidopsis lyrata
atgttgaaaatcaagagagttccgaccgtcgtttcgaactaccagaaggacgatggagcggatgattccgtcggctgtggacggaattgcctcggcgcttgttgcattaacggggctaggcttccattgtatgcatgtaagaatttggcaaaatccggcgccgtagagaagcttgtaatcagtaatgaagctaaagagcctcctgtggcttttctcgagtccctcgttctcggagagtgggaggataggttccaaagaggactttttcgctatgatgtcactgcctgcgaaaccaaagttatcccggggaagtatggtttcgttgctcagcttaacgagggtcgtcacctgaagaagaggccaactgagttccgtgtagataaggtgttgcagtcttttgatggcagcaaattcaacttcactaaagttggccaagaagagttgctcttccagtttgaagctggtgaagatggccaagttcagttcttcccttgcatgcctcttgaccctgagaattctcccagtgttgttgccatcaatgttagtccgatagagtatgggcatgtgctgctgattcctcgtgttcttgactgcttgcctcagaggatcgatcacaaaagccttttgcttgcagttcacatggctgctgaggccgctaatccatacttcagactcggttacaacagcttaggtgcttttgccacgatcaatcatcttcactttcaggcttattacttggccatgcctttccccctggagaaatctccttccaagaagataactaccactgttagtggtgtcaaaatctctgagcttctaagttaccctgtgagaagtcttctttttgaaggtggaagctctatgcaagagctatccgatactgtatcagacgcctgtgtttgccttcagaacaacaacattccttttaacattctcatctctgattgtggaagacagatcttcttgatgccacagtgttacgcagagaaacaggctctaggtgaagtaagcccggaggtgttggaaacacaagtgaacccagccgtgtgggagataagtggtcacatggtactgaagaggaaagaggattacgaaggagcttcagaggataacgcgtggaggctccttgcagaagcttctctgtcggcggaaaggtttaaggaggttattgctctcgcctttgaagccataggttgtagtaaccacgaggaggatcttgaaggaaccatagttcatcagcaaaacccaagtggtaatgttaaccagaaaagcaaccaaacccatggaggtccgatcacaaacgggacggccgcggagtgccttgtccttcagtga

SEQ ID NO: 67 - protein, 444 aa, Arabidopsis lyrata
MLKIKRVPTVVSNYQKDDGADDSVGCGRNCLGACCINGARLPLYACKNLAKSGAVEKLVISNEAKEPPVAFLESLVLGEWEDRFQRGLFRYDVTACETKVIPGKYGFVAQLNEGRHLKKRPTEFRVDKVLQSFDGSKFNFTKVGQEELLFQFEAGEDGQVQFFPCMPLDPENSPSVVAINVSPIEYGHVLLIPRVLDCLPQRIDHKSLLLAVHMAAEAANPYFRLGYNSLGAFATINHLHFQAYYLAMPFPLEKSPSKKITTTVSGVKISELLSYPVRSLLFEGGSSMQELSDTVSDACVCLQNNNIPFNILISDCGRQIFLMPQCYAEKQALGEVSPEVLETQVNPAVWEISGHMVLKRKEDYEGASEDNAWRLLAEASLSAERFKEVIALAFEAIGCSNHEEDLEGTIVHQQNPSGNVNQKSNQTHGGPITNGTAAECLVLQ

SEQ ID NO: 68 - DNA, 1296 bp, Arabidopsis thaliana
atgttgttgaagatcaaaagagttccaacagttgtatcgaattatcaaaaagatgagacagttgaagaaggtggatgtggtcggaattgtctgagcaagtgttgcatcaatggggcaagacttcctttatatacctgcaagaatcttgataaatccgtcggagagaacacagaatctccggtgacgttcctcgaatccttagttattggagagtgggaagatcgtttccaaagaggtctttttcgctatgatgtcaccgcctgcgaaaccaaggttataccggggaagtacggtttcattgcgcagctgaatgaaggtcggcatctcaagaagagaccaaccgagttccgtgttgacaaagttcttcaaccatttgatggaaacaaattcaatttcactaaagttggtcaagaagagttgcttttccagtttaaagctagcactaatgatgatgatagtgaaattcagttcttggcgagtatgcctctagacgctgataattctcctagcgtcgttgcaatcaatgtgagtccgattgagtatgggcatgtgttgctgattcctcgtgttcttgattgcttacctcaaaggattgatcacaaaagccttttgcttgctcttcaaatggcggctgaagccgataatccgtatttccgacttggatacaacagtctaggcgctttcgctaccattaaccatcttcactttcaggcttactatttggcaatgcaattcccgatagagaaagcttcttccttgaagatcactaccaccaataatggcgtcaaaatctctaaactcttgaattaccctgtgagaggtcttctagttgaaggtggaaacaccattaaagatctcgcagatactgtatcagacgcatccgtttgtcttcagaacaacaacattcctttcaacattctcatctctgactctggcaaacgaatcttccttctccctcagtgttacgcagagaaacaggctttaggagaagttagctcaacgctattggatacgcaagtgaatccagcggtttgggagatgagtggacacatggtgttgaagaggaaagaagactatgaaggagcgtcagaagagaaggcatggaggttactagctgaagtttctttatcagaggagagattcagagaagttaacactatgatatttgatgccatcggttttagtagtcacgaagaagaagaagaagaggagcttgaagagcagaattcgatgaatggtggcagcttcacaatagtgcattgtccttcagtgaaagaagaggctgtctctaattga

SEQ ID NO: 69 - protein, 431 aa, Arabidopsis thaliana
MLLKIKRVPTVVSNYQKDETVEEGGCGRNCLSKCCINGARLPLYTCKNLDKSVGENTESPVTFLESLVIGEWEDRFQRGLFRYDVTACETKVIPGKYGFIAQLNEGRHLKKRPTEFRVDKVLQPFDGNKFNFTKVGQEELLFQFKASTNDDDSEIQFLASMPLDADNSPSVVAINVSPIEYGHVLLIPRVLDCLPQRIDHKSLLLALQMAAEADNPYFRLGYNSLGAFATINHLHFQAYYLAMQFPIEKASSLKITTTNNGVKISKLLNYPVRGLLVEGGNTIKDLADTVSDASVCLQNNNIPFNILISDSGKRIFLLPQCYAEKQALGEVSSTLLDTQVNPAVWEMSGHMVLKRKEDYEGASEEKAWRLLAEVSLSEERFREVNTMIFDAIGFSSHEEEEEEELEEQNSMNGGSFTIVHCPSVKEEAVSN

SEQ ID NO: 70 - DNA, 1353 bp, Actinidia chinensis
atgttgaagatcaagagggttccgactgttgtctccaatttccaaaaggatgaggccgaggacggcgctcgatccggcggtggttgcggccgaaactgcctccagaagtgttgcattcaaggggcaaagctacctctgtatgctttcaagagggtgaaagaggttgttggtgaaaagggtttgcttgccgtcgacgacgaagaggctcctgttgctttcttggattcacttcttctcggggagtgggaggatcgtgtgcagagaggactctttcgctacgatgtcactgcttgcgaaaccaaggttattccaggagagtatggcttcattgcgcagttgaacgagggtcgtcaccttaagaagaggccaactgagtttcgtgttgacaaggtcctgcagcccttcgatgagagcaaattcaatttcactaaagttggacaggaagaggtgctgttccagtttgaagcaagcgacgacaatgaagtccagttcttcccaaatgcaccggttgatgttgagaattctcccagtgttgtggccatcaatgttagtcctattgaatatggtcatgtacttctgatccctcggattcttgaatgcctgcctcagaggattgacagggagagcttcttgcttgctcttcacatggcagcagaagctggaaacccgtacttccgattgggttacaacagcttgggtgcatttgccactatcaatcacctacatttccaggcttattacttagctgtgccctttcctatcgagaaggctcccactaggaagataactactctgaatggtggggtgaaaatctctgatctgctaaattatccagtcagagggcttgttttcgagggtggaaattctctggaagatttgtccaatgccgtctctgattccagcatttgccttcaaggcaacaacataccttacaatgtgcttatctccgattctggaaagtgtatctttctcttaccgcagtgctacgctgagaaacaggctcttggagaagtgagttccgatcttctggacacacaagtgaacccggcagtgtgggaaatcagcggacatatggttttgaagaggaaggaggactatgaggaggcgtctgaaggaaatgcttggaggctccttgctgaggtctccctttcggaggagaggttcgaagaagtcaaggcattgatctttgaagccatctcttgtgctgatgatagaagtggcagcacggctgagaacttgctcgaggagccagatgacaatccacaatctcgcaaagtagcgaatgatgcccttaacaaaggctcccaccgaggtatggtgccagggaagcaagaatgcctagttcagcactga

SEQ ID NO: 71 - protein, 450 aa, Actinidia chinensis
MLKIKRVPTVVSNFQKDEAEDGARSGGGCGRNCLQKCCIQGAKLPLYAFKRVKEVVGEKGLLAVDDEEAPVAFLDSLLLGEWEDRVQRGLFRYDVTACETKVIPGEYGFIAQLNEGRHLKKRPTEFRVDKVLQPFDESKFNFTKVGQEEVLFQFEASDDNEVQFFPNAPVDVENSPSVVAINVSPIEYGHVLLIPRILECLPQRIDRESFLLALHMAAEAGNPYFRLGYNSLGAFATINHLHFQAYYLAVPFPIEKAPTRKITTLNGGVKISDLLNYPVRGLVFEGGNSLEDLSNAVSDSSICLQGNNIPYNVLISDSGKCIFLLPQCYAEKQALGEVSSDLLDTQVNPAVWEISGHMVLKRKEDYEEASEGNAWRLLAEVSLSEERFEEVKALIFEAISCADDRSGSTAENLLEEPDDNPQSRKVANDALNKGSHRGMVPGKQECLVQH

SEQ ID NO: 72 - DNA, 1323 bp, Aquilegia sp.
atgttgagaatcaagagagttcctactgttgtttccaattaccaaaaagatggtgaagaagatgcaactgtctttactggtggttgcggtcgcaattgtcttcgtcactgctgtcttccaggggctaagttccctttgtacactgttaggaggatgaagaacaaaatcaatgaaaaggacttagttggtgagaagcaagaggccacctttcttgacacattacttcttggagagtgggaggatcgtgcacagagaggactctttcgctatgatgttactgcttgtgagaccaaggtcattccaggggaatatggttttattgcgcagctgaacgagggccgtcatcttaagaagaggcccactgaatttagggttgataaggtcctccaaccctttgacgagaacaaattcaattttaccaaagttggtcaagaggaggttcttttccaatttgaagagaaggtgaatgatgattttggagctcaatttgttgcaagtgctccaattgatactgagaattctccaagtgttgttgctattaatgtgagtcccattgaatacggtcatgtacttttgatacccaaaattctcgagcacttcccacagaggattgatcgtgagagcttcttgcttgctctgcacatggctgcagaagttgggaacccatacttccgattgggttacaacagcttgggtgcatttgcaactatcaatcatcttcatttccaggcgtattatgtgtacgttcctttccctattgagaaggctcctacccgaaagataaccacaaattctggtggtgtgaagatctctgaactgttgaactatccagtcagaggtttggtctttgagggtggcatttctattgaagatttatcaattgctgtatctgactcctgcatttgccttcaagagaacaacattccatacaatgtcctaattgctgattcgggaaaaagaacttttctgttaccccagtgttatgctgagaaacaagcgcttggggaagtgagcccagaacttctggacactcaagtgaacccagcagtgtgggaaatcagtggccacatggtcttgaaaaggaagaaagactacgaggaagcatctgaagaaaatgcatggagacttcttgcagaggtctccctctctgaagagcgtttcgaagaggtgaaaactctcatgtttgaagccattggttgcagctatgatggaattgatacagacaacaatgaagcagaatttgaaaaagaagcagatgcttcaagtgatggtgcccaccctaccattgttcctggtactcaggaatgcatggtcaatcactag

SEQ ID NO: 73 - protein, 440 aa, Aquilegia sp.
MLRIKRVPTVVSNYQKDGEEDATVFTGGCGRNCLRHCCLPGAKFPLYTVRRMKNKINEKDLVGEKQEATFLDTLLLGEWEDRAQRGLFRYDVTACETKVIPGEYGFIAQLNEGRHLKKRPTEFRVDKVLQPFDENKFNFTKVGQEEVLFQFEEKVNDDFGAQFVASAPIDTENSPSVVAINVSPIEYGHVLLIPKILEHFPQRIDRESFLLALHMAAEVGNPYFRLGYNSLGAFATINHLHFQAYYVYVPFPIEKAPTRKITTNSGGVKISELLNYPVRGLVFEGGISIEDLSIAVSDSCICLQENNIPYNVLIADSGKRTFLLPQCYAEKQALGEVSPELLDTQVNPAVWEISGHMVLKRKKDYEEASEENAWRLLAEVSLSEERFEEVKTLMFEAIGCSYDGIDTDNNEAEFEKEADASSDGAHPTIVPGTQECMVNH

SEQ ID NO: 74 - DNA, 1305 bp, Brassica napus
atgttgaagatcaagagggttccgactgttgtgtctaattaccagaaggatgaggcttctgatgaatccgtcggctgtggacggaactgcctcggtgcttgttgcattaacggggcaaggcttccgttgtacgcctgcaagaagctggataaatctggcgccggagagaagccggtggcttttcttgagtccctcgtcctcggagagtgggaggataggttccaaagaggactctttcgctacgatgtcactgcctgcgagaccaaagtgatcccagggaagtatggtttcgttgctcagctaaacgagggtcgtcacctgaagaagaggcctaccgagttccgtgtagacaaggttttgcagtcttttgatggcaacaagttcaacttcactaaagttggccaggaagagctgctcttccagtttgaagctggtgaagatagtgaagttcagttcttcccgtgcatgcctcttgacgctgagaattctcccagtgttgttgccatcaatgttagtccaatcgagtatggtcacgtgctgctgattcctcgtgttcttgactgcttgcctcagaggatcgatcacaaaagccttttgcttgcacttcacatggctgccgaagctgctaatccttacttcagactcggttacaacagcttgggtgcttttgccactatcaaccatcttcactttcaggcatattacttggccatgcctttcccattagagaaagctccttccaagaagatggttactactgctagtggtgtgaaaatctcagagcttctgagttaccctgtgagaagtcttctctttgaaggtggaagttctatgcaagacctatctgatactgtatcagacgcctgcgtttgtctccagaacaacaacattcctttcaacatactcatcgctgattgtggaaggcagatcttcctgatgccacagtgttacgcagagaagcaggctctaggtgaagtaagcccggaggtgttggagacgcaagtgaacccagctgtgtgggagataagtggtcacatggtgctcaagaggaaagaggattacgaaggagcttcggaggagaacgcatggaggctcctagcagaagcttctctgtcagaggaaaggtttaaggaggttaatgctctcatctttgaagccataggttgtagttaccaaggggaggagcttgaaggaaccgtaattggacaggacaaccctagtggcagtgttaaccagaaaagcaaccgaacccatggaggtcctatcaccaacgggactgcctctgagtgccttgttcttcagtga

SEQ ID NO: 75 - protein, 434 aa, Brassica napus
MLKIKRVPTVVSNYQKDEASDESVGCGRNCLGACCINGARLPLYACKKLDKSGAGEKPVAFLESLVLGEWEDRFQRGLFRYDVTACETKVIPGKYGFVAQLNEGRHLKKRPTEFRVDKVLQSFDGNKFNFTKVGQEELLFQFEAGEDSEVQFFPCMPLDAENSPSVVAINVSPIEYGHVLLIPRVLDCLPQRIDHKSLLLALHMAAEAANPYFRLGYNSLGAFATINHLHFQAYYLAMPFPLEKAPSKKMVTTASGVKISELLSYPVRSLLFEGGSSMQDLSDTVSDACVCLQNNNIPFNILIADCGRQIFLMPQCYAEKQALGEVSPEVLETQVNPAVWEISGHMVLKRKEDYEGASEENAWRLLAEASLSEERFKEVNALIFEAIGCSYQGEELEGTVIGQDNPSGSVNQKSNRTHGGPITNGTASECLVLQ

SEQ ID NO: 76 - DNA, 1305 bp, Brassica oleracea; identical to SEQ ID NO: 74

SEQ ID NO: 77 - protein, 434 aa, Brassica oleracea; identical to SEQ ID NO: 75

SEQ ID NO: 78 - DNA, 1323 bp, Coffea canephora
atgctgagaattaagagggttcctactgtcgtttccaactaccaaaaggaagaggcggaggaaggtgctgctcgccaaggagggggatgcggccgaaattgcctcatgatctgttgccttccaggcgcaaagctgcctttgtatcgttttaagaggttgaacgaagttgctaatgagaaggttggccttagctgcgagaacaaagaacctccggttcctttcctggaatctctcctgctcggggagtgggagggtcggatgcaaagaggcctctttcgctatgatgttactgcctgtgaaaccaaggtgattcctggtgaatatggctttattgctcagctgaatgagggcaggcaccttaagaagaggcccactgagtttcgagttgataaggttttgcagccctttgatgagaccaaattcaactttactaaagttgggcaggaagagatcctctttcagtttgagccgggcgatgaagtccagttcttgccaagtgcactcattgatactgagaactcaccaagtgttgttgccataaacgtcagtcctattgagtatggacatgtgctgttaatccctcaaattctcaattgcttgcctcagagcattgaccatgatagcttgttgcttgctctgtacatggctgcagaggctcgaagcccatacttccgattgggttacaacagcttgggtgcatttgccaccatcaaccatcttcatttccaggcctactacctggctgtgccatttcccattgagaaggctccctctaagaagatcaccaccacaaaaggtggggtgcaaatctcagaacttctgaaatatccagtcaggggtcttgtgtttgagggtggaaatactctcaaggatttgtccaatgttgtcgctgactcctgcatctgccttcaagaaactaatatcccttacaatgttcttatctcggattctggaaaaagaattttcctgttcccacagtgctatgcagagaaacaagctcttggagaagtaagcgctgagctactcgacacacaagttaacccagcagtttgggagattagtgggcatatggtgctgaaacagaagaaagattatgaggaggcatctgaggaaaatgcttggaggctcttagctgaggtatccctttctgaagagaggttccaagaagtgaaggctctgatctttgaagccatttcttctagcattgaggaaatcgacagtgtgaatccaagcgtccttgagaagccagatgtcacacatcaggctcttgaggatgttgagaccctcaacaaagggtctcagcgaacaatggtgtctgtgtaa

SEQ ID NO: 79 - protein, 440 aa, Coffea canephora
MLRIKRVPTVVSNYQKEEAEEGAARQGGGCGRNCLMICCLPGAKLPLYRFKRLNEVANEKVGLSCENKEPPVPFLESLLLGEWEGRMQRGLFRYDVTACETKVIPGEYGFIAQLNEGRHLKKRPTEFRVDKVLQPFDETKFNFTKVGQEEILFQFEPGDEVQFLPSALIDTENSPSVVAINVSPIEYGHVLLIPQILNCLPQSIDHDSLLLALYMAAEARSPYFRLGYNSLGAFATINHLHFQAYYLAVPFPIEKAPSKKITTTKGGVQISELLKYPVRGLVFEGGNTLKDLSNVVADSCICLQETNIPYNVLISDSGKRIFLFPQCYAEKQALGEVSAELLDTQVNPAVWEISGHMVLKQKKDYEEASEENAWRLLAEVSLSEERFQEVKALIFEAISSSIEEIDSVNPSVLEKPDVTHQALEDVETLNKGSQRTMVSV

SEQ ID NO: 80 - DNA, 1317 bp, Centaurea solstitialis
atgttaaggatcaagagagttcctactattgtttccatctaccaaaaagaggaggaagcggaggacggcggcgccacccgcggttgtggccggaattgtttgagaagctgttgcataacaggggctaagctacctctgtatgcttttccaaaatccaacaaggttgattcatgcgacaaaaacgagttcccttttgccttcctggagtcccttcttctaggagagtgggaggatcgcatggaaaggggacttttccgctatgatgttaccacctgtgcaactaaggtgattccaggtgaacacggctttgttgctcagctgaacgagggccgccaccttaagaaacgtcccactgagttccaagtcgataaggtgcttcagccctttgatgagaacaagttcaacttcaccaaagtcgggcaggaggaagtgcttttccagtttgaagcaagtgacgacaatgaagtcaagttccacccaaatgctgctattgatcttggcaaatccccaagtgtcgttgccattaatgttagtccaattgaatatgggcacgtgcttctgatccctcggattcttgaacgcttaccccaaaggattgaccatgaaagcttattgcttgcattgtacatggcacgtgaggctgcaagtccacactttcgtctcggttacaatagcttgggtgcatttgctactatcaatcatcttcactttcaggcttactacttggctgtgccatttccgattgagaaagctcccactagaaagatcagtgagttcaacggcggggttctgatttccgagattttcaactatcctgttagaggtcttgtgtttgagggtggaaattctattgaagatttatccaatgctgttgccgattcctgcatatgccttcaaaacaacaatataccttacaatgtgctgatttcagattccgggcgatgcatctttgtcattccgcagtgttatgcggaaaaacaggctcttggagaggtgagtcatgaagttctcgacactcaggtgaatccggccgtgtgggagatcagcgggcatatggtgttgaaacggaaggaggattacgagtgggcatcggaggaaaaagcatggaggcttcttgccgaggtttctttgtctgaagaacggtttcaggaagtgattgccatcatatttgacgccattttcggtggcgttactgagaagaagttggtggctgatgacgagcacgatatcgaccaagttggtggtgtgaaaaatgggcccaataatgcagatgcagccatggttactgggaagcaagaatgcctggttcaatactag

SEQ ID NO: 81 - protein, 438 aa, Centaurea solstitialis
MLRIKRVPTIVSIYQKEEEAEDGGATRGCGRNCLRSCCITGAKLPLYAFPKSNKVDSCDKNEFPFAFLESLLLGEWEDRMERGLFRYDVTTCATKVIPGEHGFVAQLNEGRHLKKRPTEFQVDKVLQPFDENKFNFTKVGQEEVLFQFEASDDNEVKFHPNAAIDLGKSPSVVAINVSPIEYGHVLLIPRILERLPQRIDHESLLLALYMAREAASPHFRLGYNSLGAFATINHLHFQAYYLAVPFPIEKAPTRKISEFNGGVLISEIFNYPVRGLVFEGGNSIEDLSNAVADSCICLQNNNIPYNVLISDSGRCIFVIPQCYAEKQALGEVSHEVLDTQVNPAVWEISGHMVLKRKEDYEWASEEKAWRLLAEVSLSEERFQEVIAIIFDAIFGGVTEKKLVADDEHDIDQVGGVKNGPNNADAAMVTGKQECLVQY

SEQ ID NO: 82 - DNA, 1104 bp, Chlorella vulgaris
atgtatcatattgtggttctgcgcaggagctggctgtcaggctccagcgacgaggaggggagcctgtcggaggggcgtgtcccctctgcgccctcctcggacagcggcgccaccagcctgctggacacggtgctgctggcggagtgggaggaccgcgcggagcagggccttttccgctacgatgtcaccgcgtgccccaccaaagtcgtgcccggcgcctacggctttgtcgcccagttcaacgagggccgcggctccaagaagcgccccaccgagttctgcgttgaccaggtggtgcagcgcttcgacaacggcaagttcaatttcaccaaggcgctgcagaaggaggtgctgttccagtttgaggcggcggacatgtcctccaaggggtcggccttcctgcccctggcgccggtgtcggggtcgcccaacctggtcttcatcaacgtgagccccatcgagtacgggcatgtgctgctcgtcccgcgcgctctagaccgcctgaaccagctggtgcagccggacacgctcaagctggcgctgcagttcgcgcacgaggcggccaacccgtactttcgcctcgccttcaactccctgggggcctacggcaccgtcaaccacctccacttccaggcgtactacatggctgcaccattcgctgtagagcgtgcgccgaccgttgacttgtgctgcctgaggaagtaccgccacgtgcgcgtggccatgctcgcagactacccggtgtgcgggttggtgtttgaggcgagcgactcgatcgatgagctggcgtcggtggtgggagaggcgtgccagcggctgagcgcagccaacatccctcacaacctgtttgtggtggactgcggccagcgcatcttcctcttccccaacgcattcgcccgcgccaaggcaaaaggcctggtgcccgaggatttgttggacagccaggttgacccagctgcgtttgagatcagcggtcacatcatctacaagcgcagccaggactatgagcatgtcagccaggacgccgtgtggcgtctgctgtcctatgcctcatactcagaagcagatgttctggaaatggcgcgcaaggtgctggcagtgtag

SEQ ID NO: 83 - protein, 367 aa, Chlorella vulgaris
MYHIVVLRRSWLSGSSDEEGSLSEGRVPSAPSSDSGATSLLDTVLLAEWEDRAEQGLFRYDVTACPTKVVPGAYGFVAQFNEGRGSKKRPTEFCVDQVVQRFDNGKFNFTKALQKEVLFQFEAADMSSKGSAFLPLAPVSGSPNLVFINVSPIEYGHVLLVPRALDRLNQLVQPDTLKLALQFAHEAANPYFRLAFNSLGAYGTVNHLHFQAYYMAAPFAVERAPTVDLCCLRKYRHVRVAMLADYPVCGLVFEASDSIDELASVVGEACQRLSAANIPHNLFVVDCGQRIFLFPNAFARAKAKGLVPEDLLDSQVDPAAFEISGHIIYKRSQDYEHVSQDAVWRLLSYASYSEADVLEMARKVLAV

SEQ ID NO: 84 - DNA, 1473 bp, Chlorella sp.
atggcgctgaccatcacccactgcgcaaccgtcctctccctcagccagctggctggggaggccgacgtcgacggcggcagcccggccgccacctccacccccgcctccagccccagcccggccagccccgccaagggcgcggccaccaccccagagaaggcggtgcgcgacctggcagacggcgactcgctgctgcccctctactccttcccctcgcacgacggcttcgaggtcaagcgcgtgcgctcctttggatcgtttggggacctgcaggcggcggcagtgcccgatgtggacgaccccgccagcggcgcggcccgcggctacgcctcctctgatgacgacgaggccgtgtcgctggatggctcctccgactcgggcgccagcgcacaggtggtcccccagcgcagcgtgctggacgcgctgctgctgggcgagtgggaggaccgcgcggaggcgggcctcttccgctacgacgtcaccgcctgccccaccaagctggtgcccggctcctacggcttcatcgcccagtgcaacgaggggcggctgtccaagaagcgccccaccgagttccgcgtggacctggtggcccagccctacgacgccgccaagttcaacttcacaaaggcgctgcagcaggaggtgctgttcatgtttgagcccgcgggcgggcgcggcgggcgccgcgccaagcccgccttccgccccgccgcccagccccgcgcctcgcccaacctcgtctacatcaacgtctctcccatcgagtacgggcacgtgctgctggtgccgcgcgcgctggacgcgctgtgccagctggtcacaccagacacgctgctgctggcgctgcagtttgcgcgcgaggcggacaacccctacttccgcctcgccttcaactctctgggcgcctacggcaccatcaaccacctccacttccaggcctactacctggctgcgccctacgccatggagcgggcgcccaccgtgccgctagagctggaggggctgggcgcgggcgcgggcgcgggctcgccgccgccgcagggcggcaaggggcgccgccgcgccgccaccggcgtgcgcgtcgaccagctgcgcgagtacccggtgcgcagcctggtgtttgaggcgggagactcgctgcgcgaggtggcggagctggtgggcaccgcctgccagcggctgaccgccgccaacgttccgcacaacctgttcatcgccgactgcggcgcccgcatcttcctcttccccaactgctttgccgagaagaaggcgcgggggcagatcccggaggatgtgctggagacgcaggtggaccctgccgcctgggagattgcggggcacatcgtgctcaagcgccagcaggactacgaggctgtgagccaggagagcgcgtggcgcctgctggagtttgcctcgtgcagcgaggagcggtttgctgaggtggcgcggctggcgctggagggcctcatctga

SEQ ID NO: 85 - protein, 490 aa, Chlorella sp.
MALTITHCATVLSLSQLAGEADVDGGSPAATSTPASSPSPASPAKGAATTPEKAVRDLADGDSLLPLYSFPSHDGFEVKRVRSFGSFGDLQAAAVPDVDDPASGAARGYASSDDDEAVSLDGSSDSGASAQVVPQRSVLDALLLGEWEDRAEAGLFRYDVTACPTKLVPGSYGFIAQCNEGRLSKKRPTEFRVDLVAQPYDAAKFNFTKALQQEVLFMFEPAGGRGGRRAKPAFRPAAQPRASPNLVYINVSPIEYGHVLLVPRALDALCQLVTPDTLLLALQFAREADNPYFRLAFNSLGAYGTINHLHFQAYYLAAPYAMERAPTVPLELEGLGAGAGAGSPPPQGGKGRRRAATGVRVDQLREYPVRSLVFEAGDSLREVAELVGTACQRLTAANVPHNLFIADCGARIFLFPNCFAEKKARGQIPEDVLETQVDPAAWEIAGHIVLKRQQDYEAVSQESAWRLLEFASCSEERFAEVARLALEGLI

SEQ ID NO: 86 - DNA, 1308 bp, Glycine max
atgttgagcattaagagggttcccactgtggtttcaaattatcaaaaagaagagacaggggaggctgctgccggaggttgtggtcgtaactgcctcaaaagttgttgcattcaaggtgcgagactgcctttgtatgctttcaagaaggtggacaaggtttgtggaaatgaattgcctttgcttggatgcaaggagcagcaccctgtggcctttctggactcgcttgttcttggagagtgggaagatcgcatgcagagagggcttttccgctatgacgttacagcctgtgaaaccaaggtgattcctggggagtatggtttcattgctcagctgaatgagggtcgtcacctcaagaagagaccaactgagtttcgtgttgataaggtcctccagccctttgatgaaaacaagtttaacttcactaaagttgggcaagaagaggtcctgtttcagcttgaggctagcaatgatggggaggttcaattctttccaaatgcacctattgatgtagagaattctcctagttttgttgccatcaaggtgagtcctattgaatatgggcatgtgctgctgattccacggatttttgagtgtttacctcaaaggattgaccatgcaagcttcttgcttgcacttcaaatggcagttgaagcaaggaatccatattttaggttgggttacaacagcttgggtgcatttgcaaccattaaccatctccactttcaggcatattacttggctcttccttttccaattgagaaggcccctactaagaaaattgccaagttaagcggtggtgtgataatatctaaactgttaaactatccagtcagaggccttgtctttgagggcggtcatacactagaggatttagcaaatgctgtttcagaagcctgcatctgccttcagcacaacaacataccttacaatgtacttatttcagattgtggaaggcaaatatttctcttaccacagtgctatgcagagaaacaagcccttggagaagtgagtcctgagcttctggagacccaagtgaatcctgctgtgtgggaaattagtgggcacatggtgctgaagaggaagaaggactatgaggaggcatctgaagccaatgcttggaggcttcttgctgaggtttccctctctgaagagaggcttctagaagtcactgctcttgtttttcaagccattacatcatcggttgagatgaatgtcaagcctcaacgtcttgaggaagttgatgccgttagcccaaacgcacagcatgccatggtggctggttcacatgaatgccttgttctccagtaa

SEQ ID NO: 87 - protein, 435 aa, Glycine max
MLSIKRVPTVVSNYQKEETGEAAAGGCGRNCLKSCCIQGARLPLYAFKKVDKVCGNELPLLGCKEQHPVAFLDSLVLGEWEDRMQRGLFRYDVTACETKVIPGEYGFIAQLNEGRHLKKRPTEFRVDKVLQPFDENKFNFTKVGQEEVLFQLEASNDGEVQFFPNAPIDVENSPSFVAIKVSPIEYGHVLLIPRIFECLPQRIDHASFLLALQMAVEARNPYFRLGYNSLGAFATINHLHFQAYYLALPFPIEKAPTKKIAKLSGGVIISKLLNYPVRGLVFEGGHTLEDLANAVSEACICLQHNNIPYNVLISDCGRQIFLLPQCYAEKQALGEVSPELLETQVNPAVWEISGHMVLKRKKDYEEASEANAWRLLAEVSLSEERLLEVTALVFQAITSSVEMNVKPQRLEEVDAVSPNAQHAMVAGSHECLVLQ

SEQ ID NO: 88 - DNA, 1329 bp, Gossypium raimondii
atgatgcagctcagtattaagagggttcctactgttgtttcgaattaccaaaaggatgaggcggaagagactgctcgccggagcggtggatgtgggaagaattgccttagaagctgttgcattccaggagcaaagcttcctttatatgctttcaagaaggagagtgaaaaagatgcatttgaaagtgaaaacaaagagcctccagttgcttttcttgattctctcgttcttggggagtgggaggatcgcatgcaaagagggctctttcgatatgatgtcactgcctgtgaaaccaaggtgattcctggtgaatatggctttattgcccagctgaacgagggccgccaccttaagaagaggccaactgagttccgtgtagataaggttctccagcccttcgatgggaacaaattcaacttcaccaaagtcggacaagaagaggtgctcttccagtttgaagcaagtgaagatggtgaagttcagttcttcccgaatgctcccattgatgttgagaatcacccaagtgttgttgccataaacgttagtcctattgaatacggacatgtgctgttgatccctcgaattcttgaatgcttgcctcagaggatcgaccatgagagctttttgcttgcgctctatatggcagctgaagctgggaatccgtactttagattgggttacaacagcttgggtgcatttgctacaatcaatcacctgcacttccaggcttactacttggctgtggcctttcccattgagaaagctcctaccaagaagaaaacctctctgaatgatggagtcatcatctcagagcttttaaagtatccggtcagaggtgttgtctttgagggtggtaacactcttcaagacttgtctgacgcagtgtctgatgcgtgcatttgccttcaagataacaacatagcatacaatgtcctcatctctgattgtggaaagcggatcttcctccttcctcagtgttatgctgagaaacaagctcttggggaagtgagtgtagagcttttggacacccaagtgaacccggctgtgtgggaaattagtggtcatatggtgttgaaaaggaggaaggactacgatgaggcgtccgacgaaaatgcttggaggttacttgcagaggtatctctctctgacgagaggtttgatgaagtgaatgcacttatctttgaagccattggcggtggcaaagatgcaattgaaaatgttgaggagcctgataccaaagctcaatctattgaaaaagagaatggcatcaccgaaacttcccaccatgctatggtggctgggacacaacaatgccttgttctgcagtag

SEQ ID NO: 89 - protein, 442 aa, Gossypium raimondii
MMQLSIKRVPTVVSNYQKDEAEETARRSGGCGKNCLRSCCIPGAKLPLYAFKKESEKDAFESENKEPPVAFLDSLVLGEWEDRMQRGLFRYDVTACETKVIPGEYGFIAQLNEGRHLKKRPTEFRVDKVLQPFDGNKFNFTKVGQEEVLFQFEASEDGEVQFFPNAPIDVENHPSVVAINVSPIEYGHVLLIPRILECLPQRIDHESFLLALYMAAEAGNPYFRLGYNSLGAFATINHLHFQAYYLAVAFPIEKAPTKKKTSLNDGVIISELLKYPVRGVVFEGGNTLQDLSDAVSDACICLQDNNIAYNVLISDCGKRIFLLPQCYAEKQALGEVSVELLDTQVNPAVWEISGHMVLKRRKDYDEASDENAWRLLAEVSLSDERFDEVNALIFEAIGGGKDAIENVEEPDTKAQSIEKENGITETSHHAMVAGTQQCLVLQ

SEQ ID NO: 90 - DNA, 1317 bp, Helianthus annuus
atgatgttgaggatcaaaagggttcctactgttgtgtctaattaccagaaggatgaggtggaggaagctggtgctggtgctcttgggtgtggccgtaattgcatgagagattgttgcctaccaggagcaaagctacctctgtatgctttccaaaaatctgataaggttgaatccagtgacaaaaaggatccgccttttgctttcttggaatctcttctccttggagagtgggaggatcgcgtggagaggggcctgtttcgctatgatgttaccgcctgttctactaaggtgattccaggggattacgggtttatcgcgcagttaaacgagggtcgccacctcaaaaagcgtccaactgaatttcgagtggataaagttcttcagcctttcgacggaagcaagttcaacttcactaaagtcgggcaggaagagattctttttcagtttgaagcaagcaaagacggtgaagtcaaattctatcctaatgcccctgttgatgtagaaagttcccctagtgttgttgccattaatgttagtccaattgaatacggacacgtgcttttgattcctcgaattctcgagtgtttgcctcaaagaattgaccatgaaagcctcttgcttgcactttacatggcgtcagaagctgggaatctgtacttccgtttgggttacaatagtctcggtgcttttgctactatcaatcatcttcattttcaggcttattatcttgttgttccgtttccaatcgagaaagcccccactagaaagatcaccgacttcaatggtggagttgtaatttccgagattctcaagtaccctgttagaggccttgtcttcgagggtggatattcacttgaagatctatcaaatgctgtcagtgattcatgcatctgccttcaagacaacaatattccgtataatgtccttatttcaggctccgggacccgcgtgtttctcttacctcagtgctatgcggagaaacaagctctaggagaagtgagtcccgagcttctagacacacaggtgaacccagcggtttgggagatcagcggacacatggtgttgaaacggaaacaagactatgaaggtgccagcgaggataacgcgtggcgacttcttgctgaggtgtcactctctgaagctcggttccaggaagtggtagccctcatctttgaagccatctcgtgtgttgttactgagaatgtgagcgtgcctgatgaagatgagcaagatgttgaagatgttgatgcccttaacaatgggtcccaccagaccgccattgttgctggaaagcaagaatgcctagttcagcactag

SEQ ID NO: 91 - protein, 438 aa, Helianthus annuus
MMLRIKRVPTVVSNYQKDEVEEAGAGALGCGRNCMRDCCLPGAKLPLYAFQKSDKVESSDKKDPPFAFLESLLLGEWEDRVERGLFRYDVTACSTKVIPGDYGFIAQLNEGRHLKKRPTEFRVDKVLQPFDGSKFNFTKVGQEEILFQFEASKDGEVKFYPNAPVDVESSPSVVAINVSPIEYGHVLLIPRILECLPQRIDHESLLLALYMASEAGNLYFRLGYNSLGAFATINHLHFQAYYLVVPFPIEKAPTRKITDFNGGVVISEILKYPVRGLVFEGGYSLEDLSNAVSDSCICLQDNNIPYNVLISGSGTRVFLLPQCYAEKQALGEVSPELLDTQVNPAVWEISGHMVLKRKQDYEGASEDNAWRLLAEVSLSEARFQEVVALIFEAISCVVTENVSVPDEDEQDVEDVDALNNGSHQTAIVAGKQECLVQH

SEQ ID NO: 92 - DNA, 1299 bp, Helianthus exilis
atgttgaggataaagagggttcctactattctttcgaattatcaaaaggaggaggctgaggaaggtggtgttgcacgtgggtgtggtcggaattgtctcagaaaatgttgtctgccaggctctaagttgcctctgtatgcttttccgaaaaccgataaggttgaattgtgtgggaaaaatgggattccttttgctttcttggactcccttcttcttggagagtgggaggatcgaatggagagggggctttttcgctatgatgttaccgcctgtgaaactaaggtgattccgggtgaacacggttttattgctcaactgaacgagggacgacacctcaaaaaacgacccacagagttccaggttgataaggtgctgcaggcctttgatgagaacaagttcaacttcaccaaagttgggcaggaagaagtactgttccaatttggaccaagtgaagatggtgaagtgcggttctatccaaacgctcccattgacgttgacaattcaccaagtgttgttgctatcaatgttagtccgattgaatacggacatgtgcttcttatccctcgaattctcgagcacttacctcaaaggatcgaccacgaaagcttattgcttgcgctgcacatggcacacgaggccggaagtccttactttcgtttaggctacaatagcttgggtgcattcgctaccatcaatcaccttcacttccaggcttactacttggctgtgccatttccgattgagaaagcggccactaaaaagattactgattttaacggtggggtcgaagtttacgagcttctcgactatcccgttcgcggtcttgtattcgaaggcggaaattctctaaaagatctttcgaactctgtagctgacacctgcatatgccttcaagatcacaacataccttacaatgtgctcatttcagaatctgggaaacgcgtcttcgtcattccacagtgttatgcagagaaacaggcgttaggtgaagtgagtgccgagcttctagatactcaggtgaacccggccgtgtgggaaattagcggacacatggtgttgaaaaggaaggaggattacgaaggcgcgtctgaagaaaaagcgtggcgacttcttgcggaggtttctttgtctgaagcgaggtttcaggaagtgacggcgattatcttcgaaacagtttcgtgtgctgccgttgagaaaatgttgcaggaggataagcaagatgctgatgaagtcggtattaacaatggtcggcgtgcaggcattgtgtctgggaagcaagaatgcctagtccaacactag

SEQ ID NO: 93 - protein, 432 aa, Helianthus exilis
MLRIKRVPTILSNYQKEEAEEGGVARGCGRNCLRKCCLPGSKLPLYAFPKTDKVELCGKNGIPFAFLDSLLLGEWEDRMERGLFRYDVTACETKVIPGEHGFIAQLNEGRHLKKRPTEFQVDKVLQAFDENKFNFTKVGQEEVLFQFGPSEDGEVRFYPNAPIDVDNSPSVVAINVSPIEYGHVLLIPRILEHLPQRIDHESLLLALHMAHEAGSPYFRLGYNSLGAFATINHLHFQAYYLAVPFPIEKAATKKITDFNGGVEVYELLDYPVRGLVFEGGNSLKDLSNSVADTCICLQDHNIPYNVLISESGKRVFVIPQCYAEKQALGEVSAELLDTQVNPAVWEISGHMVLKRKEDYEGASEEKAWRLLAEVSLSEARFQEVTAIIFETVSCAAVEKMLQEDKQDADEVGINNGRRAGIVSGKQECLVQH

SEQ ID NO: 94 - DNA, 1299 bp, Helianthus tuberosus
atgttgaggattaagagggttcctactattctttcgaattatcaaaaggaggaggctgaggaaggtggtgttgcacgtgggtgtggtcggaattgtctcagaaaatgttgcctgccaggctctaagttgcctctgtatgcttttccgaaaaccaataagtttgaattgtgtgggaaaaatgggattccttttgctttcttggactcccttcttcttggagagtgggaggatcgaatggagagggggctttttcgctacgatgttaccgcctgtgaaactaaggtgattccgggtgaacacggttttattgctcaactgaacgagggacgacacctcaaaaaacgacccacagagttccaggttgataaggtgctgcaggcctttgatgagaacaagttcaacttcaccaaagttgggcaggaagaagtactcttccaatttgaaccaagtgaagatggtgaagtgcggttctatccaaacgctcccattgacgttgacaattcaccaagtgttgttgctatcaatgttagtcctattgaatacggccacgtgcttcttatccctcgaattctcgagcgcttacctcaaaggatcgaccacgaaagcttattgcttgcactgtacatggcacacgaggccggaagtccctactttcgtctaggctacaatagcttgggtgcattcgctaccatcaatcaccttcacttccaggcttactacttggctgtgccatttccgattgagaaagcggccactaaaaagattactgattttaacggtggggtcgaagtttacgagcttctcaactatcccgttcgtggtcttgtattcgaaggcggaaattctctaaaagatctttcgaactctgtagctgatacctgcatatgccttcaagatcacaacataccttacaatgtgctcatttcagaatctgggaaacgcatcttcgtcattccacagtgttatgcagagaaacaggcgttaggtgaagtgagtgccgagcttctagatactcaggtgaacccggccgtgtgggaaattagcggacacatggtattgaaaaggaaggaggattacgaaggcgcgtctgaagaaaaagcgtggcgacttcttgcggaggtttctttatctgaagcgaggtttcaggaagtgacggcgattatcttcgaaacagtttcgtgtgctgccgttgagaaaatgttgcaggaggataagcaagatgctgatgaagtcgctattaacaatgatctgcgtgcaggcattgtgtctgagaagcaagaatgcctagtccaacactag

SEQ ID NO: 95 - protein, 432 aa, Helianthus tuberosus
MLRIKRVPTILSNYQKEEAEEGGVARGCGRNCLRKCCLPGSKLPLYAFPKTNKFELCGKNGIPFAFLDSLLLGEWEDRMERGLFRYDVTACETKVIPGEHGFIAQLNEGRHLKKRPTEFQVDKVLQAFDENKFNFTKVGQEEVLFQFEPSEDGEVRFYPNAPIDVDNSPSVVAINVSPIEYGHVLLIPRILERLPQRIDHESLLLALYMAHEAGSPYFRLGYNSLGAFATINHLHFQAYYLAVPFPIEKAATKKITDFNGGVEVYELLNYPVRGLVFEGGNSLKDLSNSVADTCICLQDHNIPYNVLISESGKRIFVIPQCYAEKQALGEVSAELLDTQVNPAVWEISGHMVLKRKEDYEGASEEKAWRLLAEVSLSEARFQEVTAIIFETVSCAAVEKMLQEDKQDADEVAINNDLRAGIVSEKQECLVQH

SEQ ID NO: 96 - DNA, 1296 bp, Hordeum vulgare
atggaggtgaagctgacgattaagagggttgcgacggtgctgtccaactaccaggaggaaggagccgggggctgcggcaggaactgcctcggggattgctgcttgcctgcttccaagcttcccctctatgctttcaaggccgacccaaagaagcctgcgcaggatgatgagctccctactgagttcttcctcaattctctcctcctcgcacagtgggaggacagggtagcccgaggcctattcagatatgacgtaacagcctgcgagaccaaggtgattcctggcgagcttgggtttgttgcacagcttaacgaaggccgccacctcaagaagcgcccaaccgagttccgtgttgaccgtgtgctccagccattcgattctgccaagttcaacttcaccaaggttggccaggaggaggttctctttcgctttgagaatggtggtggcgacagcagctatttccttgaaaatgccccaagcattgagggtgaccgtgctcccagcgttgttgcaatcaatgtgagccctattgagtacggtcatgtgcttctcattccacgtgtccttgaccgcctgcctcagcaaattgatcctgaaagcttcctgcttgcactacacatggcagctgaggctgcaagcccatactttaggcttggttacaacagcttgggtgcctttgccaccatcaatcatctccacttccaggcatactacctgtcagtaccttttcctgttgagaaggcgcctaccaagaagatcccccttgccaagtgtgcgctgaatagtggagtgaaggtgtcaaaactgacaaatttccccgtgagaggtctagtgtttgagagagggaacacactgaaggatttggctgatgtggttaccaacgcttgcatttggctccaggagaacaatgttcctttcaacgtcctcatctctgattctggtagaaggatcttcgtttttcctcagtgctatgctgagaaacaggctcttggtgaagtgagccaggatctgctggacacgcaggtgaaccctgcagtatgggagatcagtggacacattgttctgaaacggaggacggacttcgaggaggcttcagaagcatcggcctggaggcttctcgcagaggtgtctctgtcagaggagcgatttgaggaggtgaaggcatgcatcttccaggccgccggcctcactgaatctgatgaagaagaggaatccaacgagccaccttatgcatcgtcatcctccgttccgctagcctcttcacgcatgactgaaggctgccttgttcttcagtga

SEQ ID NO: 97 - protein, 431 aa, Hordeum vulgare
MEVKLTIKRVATVLSNYQEEGAGGCGRNCLGDCCLPASKLPLYAFKADPKKPAQDDELPTEFFLNSLLLAQWEDRVARGLFRYDVTACETKVIPGELGFVAQLNEGRHLKKRPTEFRVDRVLQPFDSAKFNFTKVGQEEVLFRFENGGGDSSYFLENAPSIEGDRAPSVVAINVSPIEYGHVLLIPRVLDRLPQQIDPESFLLALHMAAEAASPYFRLGYNSLGAFATINHLHFQAYYLSVPFPVEKAPTKKIPLAKCALNSGVKVSKLTNFPVRGLVFERGNTLKDLADVVTNACIWLQENNVPFNVLISDSGRRIFVFPQCYAEKQALGEVSQDLLDTQVNPAVWEISGHIVLKRRTDFEEASEASAWRLLAEVSLSEERFEEVKACIFQAAGLTESDEEEESNEPPYASSSSVPLASSRMTEGCLVLQ

SEQ ID NO: 98 - DNA, 1068 bp, Hordeum vulgare
atgtgcagcaacggttttgattcaaccaactgctttcgtatggaggagctcgaaacaaatttgtccccatttctccacaagctttttaaagagtgggatgaccgcaaggcgaggggattgtttcaccacgacatcactacctgcgagaccaaggtgctacctggagaacacaattttgttgcaacattgatagaagggcgtgaccagaagaagcggccaactgaatttggaatgaaccaagtcctccagccatttcatagtgagaagttcaatttcactaaagttaaaccacaggaggtgatcttcaggttccaagaaactgagaatgattctgcccagtattttgacggagctcctcccactgtttcagcttctcctagcagcattttaatcaacgtgagcccaattgggtactgtcatgtgcttttggtccctcgagtccaggaatgcttaccgcaaagggttgatcaagagagcttcttactggccatgtatgtcgcaaaggaggcaagaaatcccttcttcagagttggctataacagtctgggtgcctttgcaacaatcaatcacctccacttccaagcatactatctgaaagtgcaatatccagtcgaaaaggcaccaacagaggaactaacagtcgtagggaacggtgtcagcatttctcagctggtgcagtacccagtaagcggctttgtatttgaaggaggagcgagcctggaggatctgtcacaggttgtctcaaatgcctgtatcttcttgcaagagaataacagacctttcaatgttcttatctctgaatctgccatgagagtattccttctactacagtgctatgccgagaagcagacttctggaaaggcgagccaggaatttctcgacatgagaatcaatccagcagtctgggagctcagcggccatctggttctgaagaggaggaatgactacgacgaagcatccgaggcaacattatgcagttttttggttgaagcgtccctgtctggaccagagttccaggagctgaagaggtgcgtcttggagtccctggccagtgcaagtcctgaatag

SEQ ID NO: 99 - protein, 355 aa, Hordeum vulgare
MCSNGFDSTNCFRMEELETNLSPFLHKLFKEWDDRKARGLFHHDITTCETKVLPGEHNFVATLIEGRDQKKRPTEFGMNQVLQPFHSEKFNFTKVKPQEVIFRFQETENDSAQYFDGAPPTVSASPSSILINVSPIGYCHVLLVPRVQECLPQRVDQESFLLAMYVAKEARNPFFRVGYNSLGAFATINHLHFQAYYLKVQYPVEKAPTEELTVVGNGVSISQLVQYPVSGFVFEGGASLEDLSQVVSNACIFLQENNRPFNVLISESAMRVFLLLQCYAEKQTSGKASQEFLDMRINPAVWELSGHLVLKRRNDYDEASEATLCSFLVEASLSGPEFQELKRCVLESLASASPE

SEQ ID NO: 100 - DNA, 1344 bp, Mesembryanthemum crystallinum
atgttgaggattaagagagttccgacgatcgtttcgaattaccagaaggaggaaggggatggtgctgctcgtccggttggtgggtgtgggcgcaattgcctcagggaatgttgcatccaaggatcaaaactgcctttgtacgctttcaagaaggtgaacaaatttgctgctgagaaggccttagttggctacaaggcccgggagcctcctgttgccttccttgactctctcttgcttggcgagtgggaggaacgaatggagaggggcctcttccgttatgatgtcactgcctgtgaaaccaaggtgatacctggtcagtatggatttgttgcccagctcaatgagggacgccaccttaagaaaaggccaactgaattccgagttgataaggtcttgcagccctttgatggtaccaaattcaactttaccaaagttgggcaggaagaggtgctcttccagtttgaagcgagtcaagatggtgaagtccaattcattcctggtgctccaattgacgttgaaagttctccaagcgttgttgccattaatgttagccctatcgagtatggacatgtgcttctgattcctcgcatatttgagtgcttgccacagaggatcgaccacgagagcttcttgcttgctctgtacatggctatggaagctggaagtccatacttccgtcttggttacaacagcttgggtgcatttgctaccatcaaccaccttcatttccaggcttattacttggctgccccttttcccattgagaaggctccgaccaagaaaatcatcactaccactagtgggataaagatatttgagctcttgaattacccagtcaggggtctcgtctttgagggcgggaattctttggaagacttagccaaggtggtctcagactcatgcgttttccttcaagacactaacatcccttacaatgtcctcattgctgactcaggaaggcggatatttctcctcccacagtgttatgctgagaaacaagcgctaggcgaggtgagttctgaactcctcgatacccaagtgaacccagcagtgtgggagatcagtgggcatattgtgttgaagaggaaagaggactatgacgaggcatcagaggggaatgcttggaggctccttgcagaggtgtctctttctgaagcaaggttcgaagaagtgaaagccatgatattcgaagccattgctagttgtcttactggaaatgggtctgacactaatcatcttgaggaggcagagactgaacgtccacctcgtggagcaagagacaacatcaacaaaggttcttctgctatagtgaccgggaaccagcagtgcttggttctccagtga

SEQ ID NO: 101 - protein, 447 aa, Mesembryanthemum crystallinum
MLRIKRVPTIVSNYQKEEGDGAARPVGGCGRNCLRECCIQGSKLPLYAFKKVNKFAAEKALVGYKAREPPVAFLDSLLLGEWEERMERGLFRYDVTACETKVIPGQYGFVAQLNEGRHLKKRPTEFRVDKVLQPFDGTKFNFTKVGQEEVLFQFEASQDGEVQFIPGAPIDVESSPSVVAINVSPIEYGHVLLIPRIFECLPQRIDHESFLLALYMAMEAGSPYFRLGYNSLGAFATINHLHFQAYYLAAPFPIEKAPTKKIITTTSGIKIFELLNYPVRGLVFEGGNSLEDLAKVVSDSCVFLQDTNIPYNVLIADSGRRIFLLPQCYAEKQALGEVSSELLDTQVNPAVWEISGHIVLKRKEDYDEASEGNAWRLLAEVSLSEARFEEVKAMIFEAIASCLTGNGSDTNHLEEAETERPPRGARDNINKGSSAIVTGNQQCLVLQ

SEQ ID NO: 102 - DNA, 1320 bp, Medicago truncatula
atgatgctaaaaatcaaaagggttcccaccgttgtttccaattatcaaaaagaggaggttggagaggctgctcctcgtactgtcggaggttgtggtcggaattgtctcaaatcttgttgtattcaagatgcaaagctacctttgtatgcttttaaaaagattgacaaagtaaccgaaaaggatttggctatccatgagtgtcaagaggagcttcctatggcctttttggactcacttgttcttggagagtgggaagatcgcatgcaaagaggactttttcgttatgatgttaccgcctgtgaaaccaaggtgattccgggtgagtgtggtttcattgctcagcttaacgagggccgacacctcaagaagagaccaactgagttcagagttgataaggttcttcagccctttgatgaaaacaaattcaactttactaaagttgggcaagaagaggttctgtttcaatttgaagctagtgaagatggtgaagtccagttttatccaaatgccccaattgatgttgacaattatcccagttttgttgccatcaatgtcagtcctattgagtatggacatgttttgctgattccccgcattttcgagtgtttgcctcaaaggattgatcatgagagcttcttgcttgcacttcacatggcagctgaagctgctaatccatattttcgattgggttacaacagccttggtgcatttgcaactataaaccatcttcacttccaggcttattatttggctatgccctttcctattgagaaggctcccaccaagaaaattgcaacttcaaatggtggtgtgaaggtatctgaattgctgaagtatccggttagaggtcttgtctttgaaggcggcgacacgctcgaagatttatcaaaaattgtttcagatgcttgtatctccctacaaaacaacaacataccttacaatgttcttatttctgactgtggaacacaagtgtttcttttaccacagtgttatgcagagaaacaagctcttggagaagtggatgctgagcttcttgacacacaagtaaatcccgcggtgtgggagattagtggacacatggttttgaagaggaaaaaggattttgacgaggcgtctgaagccaatgcttggaggcttcttgcagaagtttcactctctgaagaaaggtttcaagaagttaatgctattatctttgaagccattgccttaactgaagaattggatgacaatgttcaatgtcttccaaaagatgattctgtcgactcgagcacataccctactgtggtggctggttcacaagaatgtgttgttctacagtaa

SEQ ID NO: 103 - protein, 439 aa, Medicago truncatula
MMLKIKRVPTVVSNYQKEEVGEAAPRTVGGCGRNCLKSCCIQDAKLPLYAFKKIDKVTEKDLAIHECQEELPMAFLDSLVLGEWEDRMQRGLFRYDVTACETKVIPGECGFIAQLNEGRHLKKRPTEFRVDKVLQPFDENKFNFTKVGQEEVLFQFEASEDGEVQFYPNAPIDVDNYPSFVAINVSPIEYGHVLLIPRIFECLPQRIDHESFLLALHMAAEAANPYFRLGYNSLGAFATINHLHFQAYYLAMPFPIEKAPTKKIATSNGGVKVSELLKYPVRGLVFEGGDTLEDLSKIVSDACISLQNNNIPYNVLISDCGTQVFLLPQCYAEKQALGEVDAELLDTQVNPAVWEISGHMVLKRKKDFDEASEANAWRLLAEVSLSEERFQEVNAIIFEAIALTEELDDNVQCLPKDDSVDSSTYPTVVAGSQECVVLQ

SEQ ID NO: 104 - DNA, 1341 bp, Malus x domestica
atgttgaggatcaagagggttcccaccgtcgtttcgaattaccagaaagatgaggcggaggagggtgctcgccgcgtcgagggttgtggccgcaattgccttaaccaatgttgcattccaggggcaaaacttccattgtatgccttcaagaagcggaacgtgaataatggtgacacgggtgtgcccggacatgacaaaagagagcctcccgttgcgtttcttgactcgctgcttctcggggagtgggaggatcgcatgcagagagggctatttcgctatgatgtcactgcttgtgaaaccaaggtgatcccagggcaatatggtttcattgcccagctgaatgagggtcgccatcttaagaagagaccaactgagtttcgagttgataaggtcctccagccctttgatagcagcaagtttaacttcactaaagttggacaagaggaggttctattccggtttgaagccagtgaagatggtgaagttcactttttccctagtgcacccattgatgttgaaaattctccgagcgttgttgccattaatgtcagtcctattgaatatggccatgtgctgttgattcctcgtatttttgagcgtttgccacaaaggattgaccgggaaagcttcttgcttgcacttcacatggcggctgaagctgggagtccttactttcgattgggttacaacagcttgggtgcatttgctaccatcaatcaccttcacttccaggcttactacttggccgtgacctttcccattgagaaggctcctaccaagaaaatatccactctgaatgctgaggtgaaggtctctgagcttctgaactatcctgtcagaggtcttgtttttgagggtggaaacactctggaagatttgtcttacaccgtctctgatgcctgcatatgccttcaagaaaacaacgtaccgtacaatgtccttatctctgattgtggaaagcgaatctttctcctgccacagtgttatgctgagaaacaagctcttggagaagtgagtgcagaggttctggatacacaggtgaatccagcggtgtgggaaattagtgggcatatggtcttgaagaggaaaaaggactacgacgaggcttcagatgaaaatgcttggaagctcctggcagaggtttccctttctgaagagaggttccaagaagtgaatgctcttattttcgaacgtattgcttccggtaataatgggaatgaaaatttgccggaggatccagaagttaagcctcgttctcatgaagaagtcgacgctaccattaacaaaagctcccgcgctgctatggttggtgagacacaagaatgcattgttctgcagtaa

SEQ ID NO: 105 - protein, 446 aa, Malus x domestica
MLRIKRVPTVVSNYQKDEAEEGARRVEGCGRNCLNQCCIPGAKLPLYAFKKRNVNNGDTGVPGHDKREPPVAFLDSLLLGEWEDRMQRGLFRYDVTACETKVIPGQYGFIAQLNEGRHLKKRPTEFRVDKVLQPFDSSKFNFTKVGQEEVLFRFEASEDGEVHFFPSAPIDVENSPSVVAINVSPIEYGHVLLIPRIFERLPQRIDRESFLLALHMAAEAGSPYFRLGYNSLGAFATINHLHFQAYYLAVTFPIEKAPTKKISTLNAEVKVSELLNYPVRGLVFEGGNTLEDLSYTVSDACICLQENNVPYNVLISDCGKRIFLLPQCYAEKQALGEVSAEVLDTQVNPAVWEISGHMVLKRKKDYDEASDENAWKLLAEVSLSEERFQEVNALIFERIASGNNGNENLPEDPEVKPRSHEEVDATINKSSRAAMVGETQECIVLQ

SEQ ID NO: 106 - DNA, 1733 bp, Micromonas RCC299
atgtcgctcaccatcaagaagatcccgacggtgctcagcatccaccagatggacgaggaggaggacccgaagttcgccggagccgtgcgaaggtgttgccgcgcgggcaagaagctgcccacgctcaccttcgcgcccgagagcgctagggactcgcgcctcatgaagaaggttcgatccttcgggtcgttcgacgaccttcgcgtgccggacatcgacgggtactccaacgaggagaccgggtcgtacaactccgacagcgactcgttctcgggcggcggctacgtgcaggacgtgtcgccgtttgacaggatcttgctcgccgcgtgggaagatcggttcgccgcgggtctctttcgttacgacgtcaccgcgtgcaagaccaaggtggtgcccggcggttacggcttcgtcgcgcagttcaacgagggcagggcgacgaagaagaggccgacggagtttgcggtggacgaagtcgtgcaggcgtttgacggcggcaagttcaactttaccaaggctgacaaggcggagatcttattcgcgtttgagcggggcgatcgcgcgatgaagagcagcgcgtacaactcggcgaagacgatcgagtcgtcgccgaacgtgatgctcataaacgtctcgcccatcgagtacggccacgtgctgctgtgcccgagggtgacggactgcttgccccagcggatatcccccgagctgttgctgccgccgctctacatggcggcggagagccggaatccctactttagggttgggtacaactcgttgggagcgtacgccaccatcaaccacctgcacttccaggcgtactacctcatggaagccttccccatcgagcgagcgcagacgacgcggttgccccaacgcgtgtacaagaagcgtcacaggcacggcgtcgcggtcaaccaggtcacggggtacccggttcgatgcctctgcttcgagcgaaaggacgcgacgttcgaggcgctcgcggatcttctcggtaacgcgtgcgagcgtctgcaggagcgcaacatcccgttcaacctcctcatcgcggatcacggcgcgcgggtgtttctcatcccgcaggttttctcgcatcgcgtcgcgaaaggggagattcccgaagacgtcgccgccaccggagtcaacccggcggtgtttgaaatctccggtcacctgctgtacaagcagcaggacgactacgacgcgtgcacgcaggacgccgcgttcaagatgctggcgtgcgcgtcgctcggcgaggaggaattttacgagacgtgctcgcacatcctcgccgagacggaatccgcgaaggggctttcagacgcaatgcacgcggcggtgcccgagcacacaaacgcggtggtgcccgattcaaatgcgacgacggaggcgatcgagattgccgctcgcaagcacagggataccgccgacgcggatccgggttcccccacgagtccgccgctgctctccgatggcgacagcgcggatggggtggtgcccggtcactgacagttgtgatataatcgatttttttgggagggaagggggggaaattccgtgtaggggatacagtagagaagagttgccggccgcagttggcgcgtggattcgccgcggccgtagatttcagggggacatgcgcgagatacccaccaagggcacacgcgtcgaaagccgacccttcgccgatatgatttgtactaataattatacgatgagaggaattgagg

SEQ ID NO: 107 - protein, 503 aa, Micromonas RCC299
MSLTIKKIPTVLSIHQMDEEEDPKFAGAVRRCCRAGKKLPTLTFAPESARDSRLMKKVRSFGSFDDLRVPDIDGYSNEETGSYNSDSDSFSGGGYVQDVSPFDRILLAAWEDRFAAGLFRYDVTACKTKVVPGGYGFVAQFNEGRATKKRPTEFAVDEVVQAFDGGKFNFTKADKAEILFAFERGDRAMKSSAYNSAKTIESSPNVMLINVSPIEYGHVLLCPRVTDCLPQRISPELLLPPLYMAAESRNPYFRVGYNSLGAYATINHLHFQAYYLMEAFPIERAQTTRLPQRVYKKRHRHGVAVNQVTGYPVRCLCFERKDATFEALADLLGNACERLQERNIPFNLLIADHGARVFLIPQVFSHRVAKGEIPEDVAATGVNPAVFEISGHLLYKQQDDYDACTQDAAFKMLACASLGEEEFYETCSHILAETESAKGLSDAMHAAVPEHTNAVVPDSNATTEAIEIAARKHRDTADADPGSPTSPPLLSDGDSADGVVPGH

SEQ ID NO: 108 - DNA, 1311 bp, Nitcotiana tabacum
atgatgctcaagattaagagggttcctacacttgtttccaacttccaaaaagaagaggctgaagaaactcttgctcgtggtgctggctgtggccgcaattgcctccgaaactgctgccttccagggtcaaagctgccgctgtatgcttccaagaatttgaaaaagggcaagtctgttgccgatgaaaccaaggaacctcctgttgacttcttggaatccctccttcttggggaatgggaggatcgtcagcagaaaggtctctttcgctatgatgtcactgcttgcgaaaccaaggtgattcctggagaacatggtttcattgctcaattgaatgaaggaaggcacctcaagaagaggccaactgagttccgcgttgataaggtgctgcagccttttgatggaagcaagttcaacttcactaaagttggtcaggaggagttgctctttcagtttgaagcaagcgaggacaatgaagtccaattctttccaaatgcgcccattgatgctgagaaatctccaagtgtcgttgccattaatgtcagtcccattgagtacggacacgtgcttttgatccctaaggtccttgaatgccttccccagaggatcgacagggacagcttattgcttgcactgcacatggctgccgaagcagctaacccatacttccgattgggttataacagcttgggtgcatttgccaccatcaaccatcttcactttcaggcttattacttggctgtgccattccccattgagaaggcccccactcggaagattacttttgctgatgctggggtgaagatatctgagatgctgaattatccagttcgaggacttgtctttgagggtggaaatactttggaggatttggcaaatgttgtctctggttcctgcgtttgcctgcaagagaataacataccctacaatgttctaatcgctgattcggcaaaaaggatattccttctcccacagtgctatgcagagaaacaggctctaggggaggttagttctgaactgcttgacactcaagtcaatcctgcagtttgggagattagtggacacatggtcttgaagaggaaggaggattacgagggtgcaaccgaggcaaatgcctggaggcttctcgctgaggtctccctttctgaagcgaggttccaagaagtgacggctctcatctttgaagccattgattgcagtgttgaagagaataagaatgttactgaaggttctcctgagaagccggatgtcgcacctcagcctatggaggaaattgatgctctcaacacccatgctaccatggttcccgtctag

SEQ ID NO: 109 - protein, 436 aa, Nitcotiana tabacum
MMLKIKRVPTLVSNFQKEEAEETLARGAGCGRNCLRNCCLPGSKLPLYASKNLKKGKSVADETKEPPVDFLESLLLGEWEDRQQKGLFRYDVTACETKVIPGEHGFIAQLNEGRHLKKRPTEFRVDKVLQPFDGSKFNFTKVGQEELLFQFEASEDNEVQFFPNAPIDAEKSPSVVAINVSPIEYGHVLLIPKVLECLPQRIDRDSLLLALHMAAEAANPYFRLGYNSLGAFATINHLHFQAYYLAVPFPIEKAPTRKITFADAGVKISEMLNYPVRGLVFEGGNTLEDLANVVSGSCVCLQENNIPYNVLIADSAKRIFLLPQCYAEKQALGEVSSELLDTQVNPAVWEISGHMVLKRKEDYEGATEANAWRLLAEVSLSEARFQEVTALIFEAIDCSVEENKNVTEGSPEKPDVAPQPMEEIDALNTHATMVPV

SEQ ID NO: 110 - DNA, 1332 bp, Nitcotiana tabacum
atgctgactattaaaagggtgccgacccttgtttccaattaccaagaggatgttcccgaaagcaacaacgtagtgggttgtggccgcaattgccttggattttgctgcttgcctgtttccaggcttcctctatatgcattcaagaatgatgacaatgagccaattgaaaacaatattgataccttgcctggggaggattgtcagatatcttttctgaacgatttgctgttaggtctatgggaagagcggatgagccagggactgtttcgatatgatgtgacaacctgtgagacgaaagtcattcctgggagatatggttttattgcacagctgaatgaggggcgccacctgaagaagcgaccaacagagtttcgcattgatcaggttcttcagccttttgacgagaacaaattcaattttaccaaagtgggccaggacgaagtgcttttcaggtttgagccaagtactgactacaaggcccgctacttttcgggcgtgggagtagatgttggtatttcacctagtattgttgctatcaatgtgagcccaattgagtatggccatgtacttttgatacctcgagttcttgattacttacctcagagaattgatcgtgatagtttcacagttgctctccatttcgccagagaactggcggatcccttctttagggttggttataacagtttgggcgctttcgccaccataaaccacctccacttccaggcatattacttgtcagtgccatttccagttgagaaagcaccaatgcgtaggataatgagagggaaggggctgggtgacgctggagtgattgtttccaagttattaaattaccctgtacgaggtttttcttttgagggtggaaatggaagtacagtgcgtgatttgtctgatgctgttgtcaattcctgcatctcccttcagaataagaatatacctttcaacattctcattgctcagtgtgggaagaagatatttctgtttcctcagtgctatgcagagaagcaagcacttggagttgtagaccaggagctcctcgacactcaggtgaaccctgctgtgtgggaaattagtggacatatggtgcttaagcgaagaaaagattacaatgatgcgtcagaggaatatgcatggaaacttctttctgaagtttctttatcggaggagagatttgaagaggtgaagggttatatttctgaagcagctgatttgcaagaagcggaggataaaagcatcaatccagaactagacccagagaaggaaattccagattctcctggtccgcaagttgcctcacatatgcctcaagattgtttggtattgcactga

SEQ ID NO: 111 - protein, 443 aa, Nitcotiana tabacum
MLTIKRVPTLVSNYQEDVPESNNVVGCGRNCLGFCCLPVSRLPLYAFKNDDNEPIENNIDTLPGEDCQISFLNDLLLGLWEERMSQGLFRYDVTTCETKVIPGRYGFIAQLNEGRHLKKRPTEFRIDQVLQPFDENKFNFTKVGQDEVLFRFEPSTDYKARYFSGVGVDVGISPSIVAINVSPIEYGHVLLIPRVLDYLPQRIDRDSFTVALHFARELADPFFRVGYNSLGAFATINHLHFQAYYLSVPFPVEKAPMRRIMRGKGLGDAGVIVSKLLNYPVRGFSFEGGNGSTVRDLSDAVVNSCISLQNKNIPFNILIAQCGKKIFLFPQCYAEKQALGVVDQELLDTQVNPAVWEISGHMVLKRRKDYNDASEEYAWKLLSEVSLSEERFEEVKGYISEAADLQEAEDKSINPELDPEKEIPDSPGPQVASHMPQDCLVLH

SEQ ID NO: 112 - DNA, 1074 bp, Oryza sativa
atgggcaatagaagttttgacttgagttgttctttgagaaaagaggaggaaaatggcacaaatttgtcgccatttgtccgcaaactttttaaagagtgggatgaccgcaaggcaaggggtttgtttcaccatgacatcagttcctgcgagacaaaggtactacctggtgaacacaattttgtggcgacattaatagaaggacgtgaccagaagaagcggcctactcaatttggaatgaaccaagtcctgcagccttttgatagcgtgaaattcaatttcactaaagttagcccagaggaagtgatcttcacattcaaagaatctcagaatgactctgtaaagtacttcgacaatgttcctcatgctgttgcagcttctcctactgccattttgatcaatgtgagtccaattggctactgccatgtgcttctgatccctcgaatccaggattgcttaccgcaaagggttgataaagagagcttcctacttgccatgtatgttgcaagtgaagcaaaggatccattcttcagagttggttacaacagtctgggtggtttcgcaactatcaatcatctccacttccaggcgtactatctgaaagtgcaatatccagtcgagaaggcactgacggagaagcttacgactctggggaatggtgtcagcattattcagctggttcagtatccagttagtggttttgtatttgaaggaggggcatgcctggaggatttgtccgatgttgtttcaaaagtctgcatcttcttgcaagagaataataaacctttcaatgccctcatctctgaatctggcaagagagtgttcctgctaccacagtgctacgccgagaagcaggccctcgggagagtgagccaagaattcctcgacatgagaataaacccagcagtctgggagctcagtggccatttggtactgaagaggaggaaggactacgatgaagcatctgaagcaaccatatgcaggtttttggtcgaagcgtctctgtctgaatcagaattccaagaactgaagagctgcatcttggagttcctgtccagtgcagctcctgaagaataa

SEQ ID NO: 113 - protein, 357 aa, Oryza sativa
MGNRSFDLSCSLRKEEENGTNLSPFVRKLFKEWDDRKARGLFHHDISSCETKVLPGEHNFVATLIEGRDQKKRPTQFGMNQVLQPFDSVKFNFTKVSPEEVIFTFKESQNDSVKYFDNVPHAVAASPTAILINVSPIGYCHVLLIPRIQDCLPQRVDKESFLLAMYVASEAKDPFFRVGYNSLGGFATINHLHFQAYYLKVQYPVEKALTEKLTTLGNGVSIIQLVQYPVSGFVFEGGACLEDLSDVVSKVCIFLQENNKPFNALISESGKRVFLLPQCYAEKQALGRVSQEFLDMRINPAVWELSGHLVLKRRKDYDEASEATICRFLVEASLSESEFQELKSCILEFLSSAAPEE

SEQ ID NO: 114 - DNA, 1317 bp, Oryza sativa
atggagatgaagctgaccatcaagcgggtgcccaccgtggtttccaactaccaggaggatgctgccgccaccgccggcgaacgcccccgcgccggctgcgggagggattgcctcggggattgctgcttgcccgattccaagcttccgctgtatgctttcaaggcgagtccgaaaaagccgtcttcgcaggaggatgcttccaacgatgagttctttgtcaatctcctgctcggcctgtgggaagacaggatggcccgaggtttgttccgatatgatgtcactgcctgtgagaccaaggttatcccaggcaaccttgggtttgttgcacaactgaatgaaggacgccacctcaagaagcgccctactgaattccgcgtggaccgtgtgcttcaaccatttgatgctgccaagttcaacttcaccaaagttggccaggaggaggtgctcttccaatttgagaatggtggtggtgatgacagcttctttgtggagagctccccaatcagtgttgctgatcgtgctcctaatgttgttgcaatcaatgtaagcccaattgaatatggccatgttcttctcattccccgtgtactggaccgcctgcctcagaggattgaccaggagagcttcttgcttgcactgcacatggctgctgaagccgcaagcccatacttcaggcttggctataatagtttgggtgcctttgcaaccatcaaccacctccactttcaggcatactacttgacagtgcctttccctgttgagaaggcagctaccaagaggattttccttgctgagggcacaatgaatagtggagtaaaggtgtccaagctgatgaactaccctgtgaggggactggtttttgagggaggcaactcactgagcgatctggccaatgtggtttccagcgcttgtatctggctgcaggacaacaatgtgccttacaatgttcttatctctgactgcggcaaaaagatcttcctcttccctcagtgctatgccgagaagcaggctctgggagaagtgagccaggagctactggacacgcaggttaacccagctgtgtgggagatcagtggccacatcgtgctgaaacgaaggagtgattacgaggaggcatcagaagcttctgcgtggagactcctcgctgaggtttccctgtcggaggaacgcttcgaggaagtgaaggcctacatctttgatgccgctggtctggttcagtccgacgaggaggaagtcagcgaagacgaggacgccacctacacgcctgtctccattgcccctcctgctgtcgcggaaggctgcctcgtccttcagtga

SEQ ID NO: 115 - protein, 438 aa, Oryza sativa
MEMKLTIKRVPTVVSNYQEDAAATAGERPRAGCGRDCLGDCCLPDSKLPLYAFKASPKKPSSQEDASNDEFFVNLLLGLWEDRMARGLFRYDVTACETKVIPGNLGFVAQLNEGRHLKKRPTEFRVDRVLQPFDAAKFNFTKVGQEEVLFQFENGGGDDSFFVESSPISVADRAPNVVAINVSPIEYGHVLLIPRVLDRLPQRIDQESFLLALHMAAEAASPYFRLGYNSLGAFATINHLHFQAYYLTVPFPVEKAATKRIFLAEGTMNSGVKVSKLMNYPVRGLVFEGGNSLSDLANVVSSACIWLQDNNVPYNVLISDCGKKIFLFPQCYAEKQALGEVSQELLDTQVNPAVWEISGHIVLKRRSDYEEASEASAWRLLAEVSLSEERFEEVKAYIFDAAGLVQSDEEEVSEDEDATYTPVSIAPPAVAEGCLVLQ

SEQ ID NO: 116 - DNA, 1383 bp, Physcomitrella patens
atgttgaccatcaagagagtggagactgtggtttcaatgcaccagcagctggagcaagttcctggatgtggccgagactgtcttgggacctgttgcattcctggagcaaagttaccgctctacgcttttggtgtaaggcaatcttcgggttcgaacaagagggcgcacactggcagtgacgaccactgtgtacccgatagtgtcaaagaatcggacgtctctccgcaggagaattacttcctcgatgaattgctcctcgcacagtgggaggatcgtatggctcgtggacttttccgttatgacgtgacagcctgcgagactaagatgcttccaggagattgtggttttattgcacaactgaacgaaggcagacacttgcagaaacggccaacggagtttcgtattgatcaagtactccagccatttgatccgaagaagtttaatttcactaaggttggccaagaggaggttctgtttcaattcatgccaaacgacagtgatatgagcgagtactatgagaaagctacagtgtcaagcagtcccaatgtggttgctatcaatgttagtccaatcgaatatggacatattctgttggttccccgtgtattggatcgcctgccgcaacgaattgatcaggaatcattcttactagctttgtacatggcagcggaggcaaataatccttactttcgtttgggctacaacagccttggtgcatttgctacaatcaaccacttgcattttcaggcatattacttggctgccccctttcccattgaaagagcacccgctactagagtgtcttacggcaggaagaagagtggtgtgaaagtgtatgaactcacgatgttcccagtcagaggtcttgtgttcgagatgtgcaacagcatggtggatctttctatagccgtcgcgaatgcctgcatctatcttcagaatgaaaatattccatacaacgtgctaatcactgacagaggctccagagtcttcctccttccacagtgctttgctgaacgacaagcccgaggtgaggtggacgaagacattttagagacacaggtaaatcctgcggtgtgggaaattagcggccacattgtgctgaagcgaaggaaagactatgaccttgccactgagggttacgcatggagattaatggctgaggtttctctctctcaggagcgcttcgaagaggtgaaggcaaaatgcttgaaggctgcgtttcaagtaatttctgtcaccagtgattatctggcagggacatcaaagagaggatcttttgatttcatggtgaatgaggatatccctgctaaggactatctcaaaaccaattcgttggatgctgttgttccgaaccatggcgacgacttgagtgtagaagcttaa

SEQ ID NO: 117 - protein, 460 aa, Physcomitrella patens
MLTIKRVETVVSMHQQLEQVPGCGRDCLGTCCIPGAKLPLYAFGVRQSSGSNKRAHTGSDDHCVPDSVKESDVSPQENYFLDELLLAQWEDRMARGLFRYDVTACETKMLPGDCGFIAQLNEGRHLQKRPTEFRIDQVLQPFDPKKFNFTKVGQEEVLFQFMPNDSDMSEYYEKATVSSSPNVVAINVSPIEYGHILLVPRVLDRLPQRIDQESFLLALYMAAEANNPYFRLGYNSLGAFATINHLHFQAYYLAAPFPIERAPATRVSYGRKKSGVKVYELTMFPVRGLVFEMCNSMVDLSIAVANACIYLQNENIPYNVLITDRGSRVFLLPQCFAERQARGEVDEDILETQVNPAVWEISGHIVLKRRKDYDLATEGYAWRLMAEVSLSQERFEEVKAKCLKAAFQVISVTSDYLAGTSKRGSFDFMVNEDIPAKDYLKTNSLDAVVPNHGDDLSVEA

SEQ ID NO: 118 - DNA, 1326 bp, Populus trichocarpa
atggtgctgacgataaagaaggttcctactgtggtttcaaattatcaggaggagaattctgaaaaggggtttgaagggtgtggcaggaattgccttgggaagtgttgcttacctgtgtctaagctgcctctgtatgcattcaaggaagacaattcgaatttgattggaaatagtgttgagaaatcatcagaagagcagcctcatatgtgtttcctgcacaacctgttgctgggacaatgggaggatcgaatgagccgtggccttttccgctatgatgtaactgcttgtgatacaaagatcattcctggtagatatggtttcattgcgcaactgaacaagggccgccatctgaagaagagacccactgagttcagggttgataaggtgcttcaggattttgatgagactaagttcaatttcaccaaagtgggacaagaagaagtgcttttcaggtttgaaaaaagcattgaccacaacagacatttttttcctagtgcgccgcctataacagctgattccaacagctcaagtgttgttgctatcaatgtgagtccaattgagtatggacatgttctcttgataccccaagttctcaattgcttgcctcagaggattgatcatggcagcttcttacttgctcttcatatggctaaagaagcagcagatcctttctttagagtgggttacaacagtttgggtgctttcgccacaattaatcacctacactttcaagcttattacttagcagcacccttccctgttgagaaagctccaactagaagaataatgacaatgaagagtccgcaagatgaaggagtaatcgtttcgcagctcctgaattatccagtgcgaggtcttgtctttgagggtggaaatacagttcaggatctatctgattcagtagctagttcttgcattttcctccagaacaacaatatccctttcaatgtgctcattactgattgtggaagaagaatttttctctttccacagtgctatgcggagaaacaagcacgcggagaagcaagccaggagctgctggacactcaagttaatccagccgtttgggagatcagcggacatatagtgctgaagagacaggaggattttgacgatgcctcagaaacatatgcgtggagacttcttgctgaggtttcgctatcaaacaagagattccatcaagtaaaggcttatttattggaagcagcaggctttcagacagaaatagaggaaaataacagagatcttgagcgagaacccatctatgagcaaccttcccctgaagctgtagcacatttaccccaagattgcatggtcttttattga

SEQ ID NO: 119 - protein, 441 aa, Populus trichocarpa
MVLTIKKVPTVVSNYQEENSEKGFEGCGRNCLGKCCLPVSKLPLYAFKEDNSNLIGNSVEKSSEEQPHMCFLHNLLLGQWEDRMSRGLFRYDVTACDTKIIPGRYGFIAQLNKGRHLKKRPTEFRVDKVLQDFDETKFNFTKVGQEEVLFRFEKSIDHNRHFFPSAPPITADSNSSSVVAINVSPIEYGHVLLIPQVLNCLPQRIDHGSFLLALHMAKEAADPFFRVGYNSLGAFATINHLHFQAYYLAAPFPVEKAPTRRIMTMKSPQDEGVIVSQLLNYPVRGLVFEGGNTVQDLSDSVASSCIFLQNNNIPFNVLITDCGRRIFLFPQCYAEKQARGEASQELLDTQVNPAVWEISGHIVLKRQEDFDDASETYAWRLLAEVSLSNKRFHQVKAYLLEAAGFQTEIEENNRDLEREPIYEQPSPEAVAHLPQDCMVFY

SEQ ID NO: 120 - DNA, 1356 bp, Populus trichocarpa
atgatgcttaggatcaaaagggttcctactgttgtttccaactaccagaaagaggaaggtgaggagggttctcgccgcggagggggttgcggccgcaattgccttcaaaattgttgccttcaaggcgcacgcctacctttatatactttcaagaaagtggacaggattatcacagagcagaaggatgtgtttgaacatgacaagagtgagcctccagttgccttcctcaattcgctccttctcggggagtgggaggaccgtatgcagagagggctctttcgctatgatgtcaccacctgtgaaaccaaggtgataccgggtcgcaatggttttattgctcagctgaatgagggccgtcacttgaagaagaggccaactgaattccgtgtcgataaggtcctccagcccttcgatggaaacaaatttaacttcactaaagttggtcaagaagagatcctcttccagtttggagagagtgaagatggggaagtcaagttcttcccggatgccactattgatgctgagaattctccaagcgtggttgccatcaacgtgagccctattgaatatgggcatgtgctgttaatcccacgtgtcctggattgcttgcctcagaggattgatcgtgatagcttcttgcttgcacttcacatggcagctgaagctggggatccatacttccgactgggttacaatagcttgggtgcttttgcaaccattaaccatcttcacttccaggcttactacttgactgtgccttttccgattgagaaggcatccaccaagaagataactacgttggatggtggtgtgaaaatctctgagcttgtgaattatcctgtcagaggtctcttctttgagggtggaaatgccctgcaagatttatccaacactgtctcagatgcctgcatttgccttcaagaaaacaacataccttacaatgtgctcattgctgattgtggaaaccacatctttctccttccacagtgttatgctgagaagcaagctctaggggaagtgagttctgagcttcttgatacccaagtgaaccctgctgtgtgggaaatcagcggccatatggtgttgaagaggaagaaagactatgaggaggcatcggaagagaatgcttggaggcttcttgctgaggtgtctctctccgaagagagattccaagaagtgaatgctctcatctttaaagctatttccaacagtggtaattgcagtggaactgattctgagaacgtgcttgaggatgcaaatgttgaacatacgtctcttgaagaagtgaatgccattaatgaaaactcccattcagccatggttactgggagtccaggatgtctagttctgcagtga

SEQ ID NO: 121 - protein, 451 aa, Populus trichocarpa
MMLRIKRVPTVVSNYQKEEGEEGSRRGGGCGRNCLQNCCLQGARLPLYTFKKVDRIITEQKDVFEHDKSEPPVAFLNSLLLGEWEDRMQRGLFRYDVTTCETKVIPGRNGFIAQLNEGRHLKKRPTEFRVDKVLQPFDGNKFNFTKVGQEEILFQFGESEDGEVKFFPDATIDAENSPSVVAINVSPIEYGHVLLIPRVLDCLPQRIDRDSFLLALHMAAEAGDPYFRLGYNSLGAFATINHLHFQAYYLTVPFPIEKASTKKITTLDGGVKISELVNYPVRGLFFEGGNALQDLSNTVSDACICLQENNIPYNVLIADCGNHIFLLPQCYAEKQALGEVSSELLDTQVNPAVWEISGHMVLKRKKDYEEASEENAWRLLAEVSLSEERFQEVNALIFKAISNSGNCSGTDSENVLEDANVEHTSLEEVNAINENSHSAMVTGSPGCLVLQ

SEQ ID NO: 122 - DNA, 1368 bp, Poncirus trifoliata
atgatgttgaggatcaagagggtgccgacggttgtttcgaattatcagaaagaggagacggaggaggctgctgctgctgctcgtcgtgtaagcgggtgtgggaggaattgcttgaacaaatgttgcattcaaggtgcaaagcttcctttatatgctttcaagagggtgaacaagtttaaaactgaaatgggtgtgcatggacatgaggttagagagcccgagcctcccgttgcatttctggactcgctcgttcttggcgagtgggaggaccgcgtacagagaggactatttcgctatgatgttactgcctgtgaaaccaaggtcattcctggtcagtatggtttcattgctcaactgaacgagggccgccacctgaagaagaggcctactgagttccgtgttgataaggtcctccagccttttgatgggaacaagttcaactttaccaaagtggggcaagaagaggtgctcttccagtttgaggcaagcgaagatggtgaagtccagtttcacccaagtgcccccattgatgttgagaattctccaagtgttgttgccatcaatgtgagtcctattgagtacgggcatgtgctgttgatcccacgagttctcgagtgcttgccacagaggattgaccgtgatagcttcttgctcgcactttacatggctgcagaagctgggaatccatacttcaggttgggttacaacagcttgggtgcatttgctaccatcaaccaccttcactttcaggcttactacatggccttgccttttccaattgagaaggctcccaccaagaagataatctctactggcggtggtgtgaagatctctgagcttttaaactatccggtcagaggcctcgtctttgaaggtggaaacactctggaagacttatccaacacagtctcggatgcgtgcatttgccttcaagagaacaatattccttacaatgttctcattgctgattgtggaaagcgcatatttctcttaccacagtgctatgctgagaaacaagctcttggggaagtgagttcagagcttctggacacccaagtgaaccctgctgtgtgggaaattagtgggcatatggtgttaaagaggaagaaggactatgaagaggcatccgaggaaaatgcttggaggctgcttgccgaggtctctctctctgaggagaggtaccaagaagtaaatgctctcatctttgaagccattgcgcgtggtgatgatgccaatggaggtgttgctgagagcataattggggaggcagatgcgaaaccaaagtctcgcggagaagtggatgcaattaataaaaactcttgccctgccatggtgtcagggactccagaatgcctggttcgtcagtaa

SEQ ID NO: 123 - protein, 455 aa, Poncirus trifoliata
MMLRIKRVPTVVSNYQKEETEEAAAAARRVSGCGRNCLNKCCIQGAKLPLYAFKRVNKFKTEMGVHGHEVREPEPPVAFLDSLVLGEWEDRVQRGLFRYDVTACETKVIPGQYGFIAQLNEGRHLKKRPTEFRVDKVLQPFDGNKFNFTKVGQEEVLFQFEASEDGEVQFHPSAPIDVENSPSVVAINVSPIEYGHVLLIPRVLECLPQRIDRDSFLLALYMAAEAGNPYFRLGYNSLGAFATINHLHFQAYYMALPFPIEKAPTKKIISTGGGVKISELLNYPVRGLVFEGGNTLEDLSNTVSDACICLQENNIPYNVLIADCGKRIFLLPQCYAEKQALGEVSSELLDTQVNPAVWEISGHMVLKRKKDYEEASEENAWRLLAEVSLSEERYQEVNALIFEAIARGDDANGGVAESIIGEADAKPKSRGEVDAINKNSCPAMVSGTPECLVRQ

SEQ ID NO: 124 - DNA, 1299 bp, Panicum virgatum
atggagatgaagctcaccatcaggagggtgcccaccgtcgtctccaactaccaggaggacgccgacaagccccgagccggatgcgggaggaactgcctcggccactgctgcctgcctgtttccaagcttcccctctatgctttcaaggcaaatccggcaaaacctgcacaggaggatgctgcttcaactaagtcccttgtcaatatcctccttgctgagtgggaggacaggatggcccggggcttattccgctatgatgtcactgcctgtgagaccaaggtcatccctggcaaccttgggtttgttgcacaactgaatgaagggcgccaccttaagaagcgccctactgagttccgtgtcgaccgtgtgcttcagccatttgaccctgccaagttcaacttcaccaaagttggccaggaagaggtgctcttccaatttgagaatggtgctggggatgacagctacttcctgaataatgctccaatcactgctgctgatcgtgcaccaaatgttgttgctatcaatgtgagcccaattgaatatggacacgtgcttctcattccccgtgttctggaccgcctgcctcagaagattgatccagagagcttcttgcttgcgctgcagatggcagcagaggcagccagtccatacttcaggcttggttacaatagtctaggtgcctttgctaccatcaatcacctccactttcaggcatactacttgtcagtgcctttccctgtcgagaaggcagctacccacaagatccctctttctgaagacacaaggaagagtggggtgactgtgtccaagctgataaattatcctgtgagaggcctggtatttgaggcagggaacacactgaacgacctggcaaatgtggtttccagtgcttgcatttggctgcaggacaacaatgtgccttacaatgtgcttatttcggactgtggcaagaggatcttcctcttcccccagtgctacgctgagaagcaggctctaggcgaagtgagccaagagctgctggacacccaggtgaatccagctgtgtgggagatcagtggccacattgtgctgaagcggaggaatgactatgaggaggcatctgaaacctctgcgtggaagctccttgccgaggtctccctgtctgaagaacgctttgaggaagtgaaggcttacatcttcactgctgctggtctggttcaggccgatgaggaggaagtcagcgagggtgaggaagcaacctacacgcctgtccctgttgcccctctgcctgttgcagaaggctgcctcgtcctccagtga

SEQ ID NO: 125 - protein, 432 aa, Panicum virgatum
MEMKLTIRRVPTVVSNYQEDADKPRAGCGRNCLGHCCLPVSKLPLYAFKANPAKPAQEDAASTKSLVNILLAEWEDRMARGLFRYDVTACETKVIPGNLGFVAQLNEGRHLKKRPTEFRVDRVLQPFDPAKFNFTKVGQEEVLFQFENGAGDDSYFLNNAPITAADRAPNVVAINVSPIEYGHVLLIPRVLDRLPQKIDPESFLLALQMAAEAASPYFRLGYNSLGAFATINHLHFQAYYLSVPFPVEKAATHKIPLSEDTRKSGVTVSKLINYPVRGLVFEAGNTLNDLANVVSSACIWLQDNNVPYNVLISDCGKRIFLFPQCYAEKQALGEVSQELLDTQVNPAVWEISGHIVLKRRNDYEEASETSAWKLLAEVSLSEERFEEVKAYIFTAAGLVQADEEEVSEGEEATYTPVPVAPLPVAEGCLVLQ

SEQ ID NO: 126 - DNA, 1305 bp, Phaseolus vulgaris
atgttgagcatcaagagggttcccactgtggtttccaattatcagaaggagggatcagacgagtctcctgccgaaggatgtggtcggaactgcctcaaaagttgttgcattcaaggtgcgaggctgcctttatatgcttgcaagaggggggacaagatcggtggaaaggagttgcctttgcttggatgcaaggagcattacccagtggcgtttctagactctcttatcctcggggagtgggaagaacgcatgcagagagggctattccgttatgacgtcacagcctgcgaaaccaaggtgattcctggggagtatggtttcattgctcagcttaatgagggtcgccacctcaagaagagaccaactgagttccgtgttgacaaggtcctccagccctttgatgaaagcaagtttaatttcactaaagttgggcaagaagaggtcctttttcagttggagcctagcgatgatggagaagctcaattctctccaaatgcaccaattgatgttgacaattctcctagttttgttgccatcaatgtgagtcctattgaatatgggcatgtgctgctgattcctcggatttttgagtgtttacctcaaaggattgaccatgaaagcttcttgcttgcacttcaaatggcagttgaagctgggaatccatattttaggttgggttacaacagcttgggtgcatttgcaaccattaaccatctccactttcaggcgtattacttggctatgccttttcccattgagaaagcccctaccaggaaaattaccacattgagtggtggagtgaaagtatctaaactgttacactatccagtcaggggccttgtcttcgagggtggtcatacattagagaatttagccaatgctgtttcagaagcctgcatctgccttcaacacaacaacgtgccctacaatgtacttatttcagactgtggaaggcaaatctttctcttgccacagtgctatgcagagaaacaagctcttggagaagtgagtgctgagcttctggagacccaggtgaatcctgctgtatgggaaattagtgggcacatggtgctgaagaggaagaaggactacgatgaggcatctgaagccaacgcctggaggcttcttgccgaggtctccctctctgaagagaggtacgaggaagtcactgctcttgtttttcaggccattgcatctgttgatatgaatgtcaagcctcaatgtgctgaggaagttgatgctgttagcccaagcacccagccttccatggtggttggttcacagaaatgccttgttctcctttaa

SEQ ID NO: 127 - protein, 434 aa, Phaseolus vulgaris
MLSIKRVPTVVSNYQKEGSDESPAEGCGRNCLKSCCIQGARLPLYACKRGDKIGGKELPLLGCKEHYPVAFLDSLILGEWEERMQRGLFRYDVTACETKVIPGEYGFIAQLNEGRHLKKRPTEFRVDKVLQPFDESKFNFTKVGQEEVLFQLEPSDDGEAQFSPNAPIDVDNSPSFVAINVSPIEYGHVLLIPRIFECLPQRIDHESFLLALQMAVEAGNPYFRLGYNSLGAFATINHLHFQAYYLAMPFPIEKAPTRKITTLSGGVKVSKLLHYPVRGLVFEGGHTLENLANAVSEACICLQHNNVPYNVLISDCGRQIFLLPQCYAEKQALGEVSAELLETQVNPAVWEISGHMVLKRKKDYDEASEANAWRLLAEVSLSEERYEEVTALVFQAIASVDMNVKPQCAEEVDAVSPSTQPSMVVGSQKCLVLL

SEQ ID NO: 128 - DNA, 1296 bp, Picea sitchensis
atgttgaccataaagagatgccctactattctatctaactaccaggagggttctgaagggctgggctgcggccgaaactgtttaggccaatgctgtgttccaggttcgaagttgcctttgtataccttcaagagaaggcacaccattgttggagagaaacacgtagataacgatgttaagttggcggatattccttcccttgacagtctgcttcttgggctgtgggaggaaaggatgcagaggggtttgttccgctatgatgttactatttgtgaaaccaaggtcatccctggtaattatggtttcattgctcagctgaatgaagggcgccatcttaagaaacgtcccactgaatttcgagtggacaaggtgcagcaggacttcgaccccagtaaattcaacttcaccaaagtaggccaggaagaggtgctcttccgttttgaagaaagtggggaggacaaagttcagtacttggaaaaggcccctgtcttggacagtccaaacgtggttgccatcaatgtgagtccaattgaatatgggcacgtgcttctcgtgccaagagtgttggactgcttgccccaacgcattgaccatgatagcttactgttagctctgcatttggctgctgaggctcgcaacccatcttttcgtcttgggtacaatagcctgggagcttttgcaactataaaccatctgcacttccaggcttattacttggctcttcctttccctgttgaaaaagcacccacgaaaagagtaccatggaagtctgagaaagctggggtcaagatctttgaactctacaactatcctgtgagaggcctagtttttgaagggggtaatactttggaggacctcagcaatgctgttggcagctcctgcatctgtctacaagataacaacataccatacaatgtgctcgttgcagattgcggcaaaagagtttttctgtttcctcagtgctatgcagagaaacaggctttgggagaagtggaccaagagatattagacactcaagttaatcccgctgtgtgggaaattagtggccacatggttttgaagaggaagcaagactttgacagggcttctgaggactatgcatggaaattacttgctgaagtctctttgtcagaggaaagatttgaagaagttaaagcttatattttggaagcagcagcgactgggcaggtgcaagtagtagaagaggaacaagctgatattgtggaagaagatgagattcctctttacgattcctcgaagaataaccataatgcccctatgcccctatgcatatga

SEQ ID NO: 129 - protein, 431 aa, Picea sitchensis
MLTIKRCPTILSNYQEGSEGLGCGRNCLGQCCVPGSKLPLYTFKRRHTIVGEKHVDNDVKLADIPSLDSLLLGLWEERMQRGLFRYDVTICETKVIPGNYGFIAQLNEGRHLKKRPTEFRVDKVQQDFDPSKFNFTKVGQEEVLFRFEESGEDKVQYLEKAPVLDSPNVVAINVSPIEYGHVLLVPRVLDCLPQRIDHDSLLLALHLAAEARNPSFRLGYNSLGAFATINHLHFQAYYLALPFPVEKAPTKRVPWKSEKAGVKIFELYNYPVRGLVFEGGNTLEDLSNAVGSSCICLQDNNIPYNVLVADCGKRVFLFPQCYAEKQALGEVDQEILDTQVNPAVWEISGHMVLKRKQDFDRASEDYAWKLLAEVSLSEERFEEVKAYILEAAATGQVQVVEEEQADIVEEDEIPLYDSSKNNHNAPMPLCI

SEQ ID NO: 130 - DNA, 1311 bp, Picea sitchensis
atgttgaccataaagaggtgccctaccattctatctaactaccaggagggctctgaagggcttggctgcggccgcaactgtttaggccaatgctgtgttccaggctctaagttgcctttgtacaccttcaagagaaggcataccattactggagagaaatatgcagataaagatgctgaggtggcaaatattcctttccttgactctgtgcttcttggtgagtgggaggaaaggatgcagaggggtctgttccgctatgatgtcactacttgtgaaaccaaggtcatccctggcaattatggtttcattgctcagctgaatgaagggcgccatctgaagaaacgccccactgaatttcgagtggataaggtgctgcaggactttgatcccagtaaattcaatttcaccaaagtaggccaggaagaagtgctcttccgttttgaagaaagtgcggaaaacaaagttcagtacttggaaaaggccctcgtcttggacagtccaaacgtgattgctatcaatgtgagtccaattgattatgggcacgtgcttctcgtgccaagagtattggactgcttgccccaacgcattgaccatgatagcttattgttagctatgcatttggctgctgaggctggcaacacatcttttcgtcttgggtacaacagtctaggagcttttgcaactataaaccatttgcacttccaggcttattatttggcccttcctttccctgttgaaaaaacacccacaaaaagagcaccatggaagtctgagaaaggtggggtcaagatatctgaactctgcaactatcctgtgagaggcctggtttttgaagggtgtaatactttagagaacctctctaatgctgttggcagcgcatgcatctgtcttcaagataacaacataccatacaatgtgctcattgcagattgtggcaaaagggtttttctgtttcctcagtgctatgcagaaaaacaagctttgggggaagtggaccaagagatattagacacacaagttaatcctgctgtgtgggaaattagtggacacattgttttgaagaggaagcaggactttgacagggcttctgaggactatgcatgtaaattacttgctgaagtctctttgtcagaggaaagatttgaagaggttaaagattatattttggaagcagcagctactggggaaatgcaaacagaagaagaggaacgagctgttgttgtggaagatgaggttcctgtctatgattccttgaagaataaccataatgcccctatgcatattactgaaggacgcccaattctcccatga

SEQ ID NO: 131 - protein, 436 aa, Picea sitchensis
MLTIKRCPTILSNYQEGSEGLGCGRNCLGQCCVPGSKLPLYTFKRRHTITGEKYADKDAEVANIPFLDSVLLGEWEERMQRGLFRYDVTTCETKVIPGNYGFIAQLNEGRHLKKRPTEFRVDKVLQDFDPSKFNFTKVGQEEVLFRFEESAENKVQYLEKALVLDSPNVIAINVSPIDYGHVLLVPRVLDCLPQRIDHDSLLLAMHLAAEAGNTSFRLGYNSLGAFATINHLHFQAYYLALPFPVEKTPTKRAPWKSEKGGVKISELCNYPVRGLVFEGCNTLENLSNAVGSACICLQDNNIPYNVLIADCGKRVFLFPQCYAEKQALGEVDQEILDTQVNPAVWEISGHIVLKRKQDFDRASEDYACKLLAEVSLSEERFEEVKDYILEAAATGEMQTEEEERAVVVEDEVPVYDSLKNNHNAPMHITEGRPILP

SEQ ID NO: 132 - DNA, 1308 bp, Picea sitchensis
atgttgaccataaagagatgccctactattgtatctaactaccaggagggttccgaagggctgggttgcggtcgtaactgtttaggccaatgctgtgttccaggctcgaagttgcctttgtacaccttcaagagaaggcacaccattgttggcgtggaacacgtagataaagatgtcgagatggcagatactccttttcttgacactctgcttattgggcagtgggaggaaaggatgcagaggggtctgttccgctatgatgttactacatgtgaaaccaaggtcatccctggtaattatggtttcattgctcagttgaatgaaggacgccatcttaagaaacgtcctactgaatttcgagtggacaaggtgcagcaggactttgaccgcagtaaattcaacttcaccaaagtaggccaggaagaggtgctcttccgttttgaagaaagtgaggaaggaaaagttcagtacttggagaaggccccagtcttggatagtccaaacgtgattgccatcaatgtgagtccaattgaatatgggcatgtgcttctcgtgccaagagtattggactgcttgccccaacgcattgaccatgatagtttactattagctctgcatttggctgctgaggctggcaatccgtcttttcgtcttggttacaatagcctgggagcttttgcaactataaaccatctgcacttccaggcttattatttggcacttcctttccctgtcgaaaaagcactgacgaaaagagtaccatggaggtctgagaagggcggggtcaaaatctttgagctctgcaactatcctgtgagaggccttgtgtttgaagggggtaatactttggaggacctctgcaatgccgttggcagctcttgcatctgtcttcaagataacaacataccatacaatgtgctcattgcagattgtggcaaaagagtttttctgtttcctcagtgctatgcagaaaaacaggctttgggagaagtgaatcaagggatattagacactcaagtgaatcctgccgtgtgggaaattagtggacacatcgttttgaagagaaagcaggactttgacagggcttctgaggactatgcatggaaattacttgctgaagtctctttgtctgaggagagatttgaagaagttaaagcttatatttttgaagcagtagctagtggtgaggtgcaaacggaagaagaggaacaagctgatgttgtggaagatgaggatcctcttcattccttgaagaataaccatgatgcccctatgcatttgaatgaaggatgcctcgtgctcccctga

SEQ ID NO: 133 - protein, 435 aa, Picea sitchensis
MLTIKRCPTIVSNYQEGSEGLGCGRNCLGQCCVPGSKLPLYTFKRRHTIVGVEHVDKDVEMADTPFLDTLLIGQWEERMQRGLFRYDVTTCETKVIPGNYGFIAQLNEGRHLKKRPTEFRVDKVQQDFDRSKFNFTKVGQEEVLFRFEESEEGKVQYLEKAPVLDSPNVIAINVSPIEYGHVLLVPRVLDCLPQRIDHDSLLLALHLAAEAGNPSFRLGYNSLGAFATINHLHFQAYYLALPFPVEKALTKRVPWRSEKGGVKIFELCNYPVRGLVFEGGNTLEDLCNAVGSSCICLQDNNIPYNVLIADCGKRVFLFPQCYAEKQALGEVNQGILDTQVNPAVWEISGHIVLKRKQDFDRASEDYAWKLLAEVSLSEERFEEVKAYIFEAVASGEVQTEEEEQADVVEDEDPLHSLKNNHDAPMHLNEGCLVLP

SEQ ID NO: 134 - DNA, 1359 bp, Ricinus communis
atgagtaacaaattgatgctgagtatcaagagggttcccactgttgtttccaatttccaaaaagacgaggccgaagatggtgctaaaaggagtgggggctgtggccgtaattgccttcagaagtgttgcattcaaggcgcaaagctccctttgtatgctttcaagagattaaataagattgtttgcgaaaaggaggagattgaacatgagaacattgaacctcctgttgcattccttgactcgctccttcttggggagtgggaggaacgtatgcagagaggccttttccgttatgatgttactgcctgtgaaaccaaggtgattcctggccagtatggtttcattgctcagctgaatgagggccgtcacttgaagaagaggccaactgaatttcgtgttgacaaggtcctccagccctttgatgggaacaaattcaacttcactaaagttggccaagaagaggtgctcttccagtttgaagcaagtgaggacgatgatattcagttcttcccaagtgcccctattgatgttgagaattctccaagtgtggttgccattaatgttagccctattgagtatgggcatgttctgttgatcccacgtatactagactgcttgccacagaggatcgaccgtgacagcttattgcttgcactttacatggcagctgaagctgggaatccatacttccgtttgggttacaacagcttgggtgcatttgctaccatcaaccaccttcacttccaggcttactacttggctgtgcaatttcctattgagaaggcacccactaagaagattaccactttggattgtggggtgaaaatagctgagcttgtgaattaccctgtcagaggacttctatttgagggtggaaatactctgcaagatttatccaataccatttccgatgcttgcatctgccttcaagataacaacataccatacaatgtgctcatctctgattgtggaaagtgtgtctttctcttgccacagtgttatgcagagaaacaagctcttggggaagtgagtgctgaacttcttgatacgcaagtgaacccagctgtgtgggaaattagtggccatatggtgttgaaaaggaagaaggactatgaggaggcatctgaggagaatgcttggaggctgctcgctgaggtttctctctctgaagcaagattccaggaagtgaatgctctcattttcgaagccatttcttatgctggtagtagcagtgataatgaagctcagaacatgcttgaagacgaagatgtcaattctgttggagaagttggtgcaattaaccaaagctcacactgcactatggtgactgggaatcaagaatgcctcgttcagcagtaa

SEQ ID NO: 135 - protein, 452 aa, Ricinus communis
MSNKLMLSIKRVPTVVSNFQKDEAEDGAKRSGGCGRNCLQKCCIQGAKLPLYAFKRLNKIVCEKEEIEHENIEPPVAFLDSLLLGEWEERMQRGLFRYDVTACETKVIPGQYGFIAQLNEGRHLKKRPTEFRVDKVLQPFDGNKFNFTKVGQEEVLFQFEASEDDDIQFFPSAPIDVENSPSVVAINVSPIEYGHVLLIPRILDCLPQRIDRDSLLLALYMAAEAGNPYFRLGYNSLGAFATINHLHFQAYYLAVQFPIEKAPTKKITTLDCGVKIAELVNYPVRGLLFEGGNTLQDLSNTISDACICLQDNNIPYNVLISDCGKCVFLLPQCYAEKQALGEVSAELLDTQVNPAVWEISGHMVLKRKKDYEEASEENAWRLLAEVSLSEARFQEVNALIFEAISYAGSSSDNEAQNMLEDEDVNSVGEVGAINQSSHCTMVTGNQECLVQQ

SEQ ID NO: 136 - DNA, 1047 bp, Sorghum bicolor
atggatgacactagttttgacctgacagagcacgaaggttcaaatttgtcaccatttctacacagactttttaatgagtgggatgatcgcaagacgaggggcttgtttcatcatgacatcagttcctgtgaaacaaaggtgctacctggagaacacaattttgtggcaacattaattgaaggacgggatcaaaagaaacggccaactgagttcacaatgaaccaagtcctccaaccatttgtcagtgagaagtttaatttcacaaaagttagcccattggaggtgatctttagattcaatgaaactgagaaagactctgcacaatattttgatggtgttcctgatactgtttcagcttcttctagtgccatcttgattaatgtgagtccaattggctactgccatgcccttttgactcccaaaatccaggactgtttaccgcaaaggattgatcaagagagctttttgatagccatgtatgttgcaagagaggcaaggaatcccttcttcagagttggttataacagcctgggcggctttgcaactatcaatcaccttcacttccaggcatactaccttagagtacagtatccagttgaaaaggcaaccacggagaagctcacgagcctagggaatggcgtgagcatttttcacctactggattatccagtcagtggatttttgttcaaaggtggtgcgagcctggaagatttgtcggatgtggtctccaaagtgtgcatcttcttgcaagagaacaacagacctttcaatgtcctcatctctgaatccggcaagagagttttcctcctaccacagtgctatgcggagaagcagatcctcggaaaggcgagccaagagttcctcgacatgagaatcaatccagcaatctgggagctcagtggccatttggtgctgaagaggaggaaggattacgacgaagcctccgaggcaaacatatgcagatttttggttgaagcagctctttctgaaaccgaatttcaggagttgaaccgatgcctgctcgactttgtgacctcttggttgtaa

SEQ ID NO: 137 - protein, 348 aa, Sorghum bicolor
MDDTSFDLTEHEGSNLSPFLHRLFNEWDDRKTRGLFHHDISSCETKVLPGEHNFVATLIEGRDQKKRPTEFTMNQVLQPFVSEKFNFTKVSPLEVIFRFNETEKDSAQYFDGVPDTVSASSSAILINVSPIGYCHALLTPKIQDCLPQRIDQESFLIAMYVAREARNPFFRVGYNSLGGFATINHLHFQAYYLRVQYPVEKATTEKLTSLGNGVSIFHLLDYPVSGFLFKGGASLEDLSDVVSKVCIFLQENNRPFNVLISESGKRVFLLPQCYAEKQILGKASQEFLDMRINPAIWELSGHLVLKRRKDYDEASEANICRFLVEAALSETEFQELNRCLLDFVTSWL

SEQ ID NO: 138 - DNA, 1308 bp, Sorghum bicolor
atggagatgaagctcaccatcaagagggtgcccaccgtcgtctccaactaccaggacgacgccgacaagccgcgcgccggctgcgggaggaactgcctcggcgactgctgcctgcctgcttccaagcttcccctctacgcgttcaagttgaatccggcaaagcgctcgcaggagggtgctgcttcaaccaagctgcttgttgatatcctccttagcgagtgggaagacaggatggcccgaggcttattccgctatgatgtcactgcctgtgagaccaaggtcatccctggcaaccttgggtttgttgcacaactcaatgaagggcgccaccttaagaagcgccctactgagtttcgtgtggaccgtgtgctccagccatttgaccctgccaagttcaatttcaccaaagttggccaggaagaggttctcttccaatttgagaatggtgatggtgatgacagctatttcctgaatgacgctccaatcattgctgttgatcgtgctccaaatgttgttgctatcaatgtgagcccaattgaatatggacatgtgcttctcattcctcgtgttctggaccgcctgcctcagaagattgatccagagagcttcttgcttgcactgcaaatggcagctgaggcagctagcccttacttcaggcttggttacaatagcttgggtgcctttgccaccatcaatcacctccactttcaggcatactacttgtcagtgcctttccctgtcgagaaggcagctaccctcaagatccctctttctgaggacacaatgaagaatggagtgaccgtgtccaagctgataaattatcctgtgagaggcctggtatttgagggagggaacacactggaggacctggcaaatgtggtttccaatgcttgcatttggctgcaggacaacaatgtgccttacaacgtgctcatttctgactgtggaaagagggtcttcctgttcccccagtgttatgcagagaagcaggctctgggtgaagtgagccaggagctgctggacactcaggtgaacccagccgtgtgggagataagtggccacatcgtgctgaagcggaggagcgactatgaggaggcatctgaaacctctgcgtggaagctcctcgctgaggtctccctctctgaggagcgcttcgaggaagtgaaggcgtacatcttcagcgctgctggcctggttctgtctgacgaggaagaggaggaagccagtgagggcaagggcaccaccacctttgctcctgtcccagtttccccaatgcctgtcgctgaaggctgcctcgtccaccagtga

SEQ ID NO: 139 - protein, 435 aa, Sorghum bicolor
MEMKLTIKRVPTVVSNYQDDADKPRAGCGRNCLGDCCLPASKLPLYAFKLNPAKRSQEGAASTKLLVDILLSEWEDRMARGLFRYDVTACETKVIPGNLGFVAQLNEGRHLKKRPTEFRVDRVLQPFDPAKFNFTKVGQEEVLFQFENGDGDDSYFLNDAPIIAVDRAPNVVAINVSPIEYGHVLLIPRVLDRLPQKIDPESFLLALQMAAEAASPYFRLGYNSLGAFATINHLHFQAYYLSVPFPVEKAATLKIPLSEDTMKNGVTVSKLINYPVRGLVFEGGNTLEDLANVVSNACIWLQDNNVPYNVLISDCGKRVFLFPQCYAEKQALGEVSQELLDTQVNPAVWEISGHIVLKRRSDYEEASETSAWKLLAEVSLSEERFEEVKAYIFSAAGLVLSDEEEEEASEGKGTTTFAPVPVSPMPVAEGCLVHQ

SEQ ID NO: 140 - DNA, 1317 bp, Solanum lycopersicum
atgttgactgtaaagagggtgcctacactggtttccaactatcaagaggatgttctcgaaggtaacgtcatgggttgtggccgcaagtgcctcggaaaatgctgcatgcctgtttcagtacttcctctatatgcattcaagaatgatgataatgagccaattgaaaatgatgttcaaaccttgcctgaggaggagtgtcagatgtcattcttgaacgatttgttgttgggcttatgggaggagcggatgagccagggactatttcgatatgatgtgacaacctgtgagacgaaggtcattcctgggagatgtggttttattgcgcaactgaatgaggggcgccacctaaagaagcgcccaacagagttttgcattgataaggttcttcagccttttgacgagaacaaattcaactttaccaaagtgggccaggaagaagtgcttttcaggtttgaaccaagtaccgactacaaggcccattacttttccggcatgcgagtaaacagtggtatttcacctagtattgttgctatcaatgtgagcccaattgagtatgggcacgttcttttgatacctcgagttcttgattgcttacctcagagaattgatcgtgatagttttgcaattgctctccattttgccagagaagtggcagatcctttctttagggtaggttataacagtttgggcgcttttgctaccattaaccacctccacttccaggcgtattacttgtcagtgccatttccagttgagaaagcaccaatacagaaaatactggcaaggaaggggctgggtggtgctggagtgattgtatctaagttattaaattaccccgtacgaggttttgcttttgagggaggaaatggaagtactgcccgtgatttgtctgatgctgttgtgaattcctgcatttcccttcagaataaaaacatccctttcaacattctcattgctcagtgtggaaagaagatttttctgcttccccagtgttatgcagagaagcaagcactaggagttgtagaccaagagctcctggacactcaggtgaaccctgctgtatgggaaattagtggacatatagtgcttaagcgaacaaaggattacaatgatgcatcagaggaatatgcatggaaacttctttctgaggtttccatatcagaggagagatttgaagaagtaaagggctatatttctgaagcagctgatctacaagcagatgaggatgaaaacatcaatccagagaaggaaattccagattctcctggtccgcaggtggcctcacatattcctccagattgtttggtgttgcagtga

SEQ ID NO: 141 - protein, 438 aa, Solanum lycopersicum
MLTVKRVPTLVSNYQEDVLEGNVMGCGRKCLGKCCMPVSVLPLYAFKNDDNEPIENDVQTLPEEECQMSFLNDLLLGLWEERMSQGLFRYDVTTCETKVIPGRCGFIAQLNEGRHLKKRPTEFCIDKVLQPFDENKFNFTKVGQEEVLFRFEPSTDYKAHYFSGMRVNSGISPSIVAINVSPIEYGHVLLIPRVLDCLPQRIDRDSFAIALHFAREVADPFFRVGYNSLGAFATINHLHFQAYYLSVPFPVEKAPIQKILARKGLGGAGVIVSKLLNYPVRGFAFEGGNGSTARDLSDAVVNSCISLQNKNIPFNILIAQCGKKIFLLPQCYAEKQALGVVDQELLDTQVNPAVWEISGHIVLKRTKDYNDASEEYAWKLLSEVSISEERFEEVKGYISEAADLQADEDENINPEKEIPDSPGPQVASHIPPDCLVLQ

SEQ ID NO: 142 - DNA, 1116 bp, Selaginella moellendorffii
atgggatttgaggcagccattgtttctaatgatcgctcagaaactaaccatgggtgtgggagaaattgcttgggaccatgttgctttcctggagcgcgagtgcctctttacttgtatggtgaggcacagtgtatggataccaagggggaaactatagacttcctacactcatttattcttgctccgtggatggagaagcaaaaacagggactcttccgctacgatgttacctcatgcgagacaaagattctttcgggagattgtggttttattgcccaactcaacgaaggcaggcattcaaaaaagcgtcccactgagtttaaaatggatcaagttttgcaagattttgatcccagtaaattcaactttactaaagttggccaagaagaagttctcttctgttttgatccagaaaattcaccatttgcaactagctcaaacatggtgagtccaatagagtttggacatatattattgattccaaggttacttaattgtctcccacaacgtttagaagtcaacacatttattatagctcttcaaatggctaaacaagcaaataatatatacttcagacttggatttaatagtttgggagcatttgctacaattaaccatctccattttcaggcttattatttggaatatatatttccagtagagaaggcatcgaaaaaactacttgtgaataatgtgaaaggttttaatatttacaaattggaaaattatcccgtaagaggcattatttatgaacttggatcaagtaattttcaagaattatcatatcaaattgttacagtatgcaatattcttgaagagcaaaatattccatacaatattcttattgctgataaaggatcacaaatttacttattcccacagtgttttgctgagagacaagttcgtggtgaagttgaggccgaaattttggaaacacaagtcaaccctgctgtttgggagataagcggtcacatagttctcaaacgcaagcaagatttcgaaaatgccacccaagaatatgcatggaaactgcttgctgaagtttcactaaacgataaagccttcaacaaaatcataaaccttgtaacaaatgataaatattactccaaaatgtaa

SEQ ID NO: 143 - protein, 371 aa, Selaginella moellendorffii
MGFEAAIVSNDRSETNHGCGRNCLGPCCFPGARVPLYLYGEAQCMDTKGETIDFLHSFILAPWMEKQKQGLFRYDVTSCETKILSGDCGFIAQLNEGRHSKKRPTEFKMDQVLQDFDPSKFNFTKVGQEEVLFCFDPENSPFATSSNMVSPIEFGHILLIPRLLNCLPQRLEVNTFIIALQMAKQANNIYFRLGFNSLGAFATINHLHFQAYYLEYIFPVEKASKKLLVNNVKGFNIYKLENYPVRGIIYELGSSNFQELSYQIVTVCNILEEQNIPYNILIADKGSQIYLFPQCFAERQVRGEVEAEILETQVNPAVWEISGHIVLKRKQDFENATQEYAWKLLAEVSLNDKAFNKIINLVTNDKYYSKM

SEQ ID NO: 144 - DNA, 1170 bp, Selaginella moellendorffii
atgctggctattaagcgagttcctacagttgtatctgtgaaccaagattgtggttctgtcagccgtgactgccttcaaagctgctttctcacaggatttgatcttcctttgtttaagtatacgaagaagatgaagacaactgagctgcagctgcttggggatgaagaagttccatcgtcaccaccgacaattgaaagatcatttctaggcacattattattgtccaagtgggaggagcgtgcatctcagggattatttcgatacgatgttacagcttgtgagtctcgggtcctctctggaaattatggatttattgcacagctcaacgagggtcgtcatttgaaaaagcgactaacagaatttcgagtggatcaagttcttcaagaatttgatcccaaaaaattcaacttttctaaagttaatcgcaacgaggtactatttcaatttggagaaggtgaggaagctgggtattatgatattactcctatcctatcatcacctgatttcgtgcttataaacgtaagtcctattgagtatggacatgttttacttgtacctcgtcttttcgattttgttcctcaacgactctgtgcaaatgatcttttattggctctttattttactgcggaggtggattgtccatactttcgagttggatataatagtcttggtgcttttgcaactataaatcaccttcactttcaggcttactatcttgcatacccatttcctgtggagtgtgcatctattacacgaattaacaaagggagtcttaaatcttccttgaggatatctgaattggttgattatcctgttaaaggagttgtttatgaaagtatggatctaaacgagattgcaatatcagttgcaagtacgtgtcaggaattggagctccgaaatatacccttcaatctattgatatgtgactgtggaacacgggtcttcttatttccacagtgttttgcacgaaagcaagcgttacaccaagtctcccagaaggttttggacactcaagtcaatccagcggcctgggaaattggcgggcatattgtgctgaagaggaaagaagactacgagcatgcaacagaagaattcgtcaccgctttactcgctgaagtttctctttcagatcctgactttcaggacgtgaaaaatattatatgcaaataa

SEQ ID NO: 145 - protein, 389 aa, Selaginella moellendorffii
MLAIKRVPTVVSVNQDCGSVSRDCLQSCFLTGFDLPLFKYTKKMKTTELQLLGDEEVPSSPPTIERSFLGTLLLSKWEERASQGLFRYDVTACESRVLSGNYGFIAQLNEGRHLKKRLTEFRVDQVLQEFDPKKFNFSKVNRNEVLFQFGEGEEAGYYDITPILSSPDFVLINVSPIEYGHVLLVPRLFDFVPQRLCANDLLLALYFTAEVDCPYFRVGYNSLGAFATINHLHFQAYYLAYPFPVECASITRINKGSLKSSLRISELVDYPVKGVVYESMDLNEIAISVASTCQELELRNIPFNLLICDCGTRVFLFPQCFARKQALHQVSQKVLDTQVNPAAWEIGGHIVLKRKEDYEHATEEFVTALLAEVSLSDPDFQDVKNIICK

SEQ ID NO: 146 - DNA, 1263 bp, Selaginella moellendorffii
atgttgacaatcaggaggattccaacaattgtatccaactatcaggagagtcttgaatccaagattggatgtggcaagaattgtttgggatcttgttgcattcctggagctagactgcctctttatctatttggaaatcaggaattggatgaacatggagaaattcaatcaaaagagttggggcaaaattcctttcttgattcagcaattcttggtcaatgggcagataagcaagcagaaggactttttcgttatgatgtcactgcttgtgctacaaaggttttaccaggaaaatatggctttatagctcaattaaatgagggccgacatttgaagaaacgtccaactgaatttcgtgtggatcaagtcttacaaccttttgatcataagaaattcaattttacaaaggttggtcaggaggaaatgttattttgctttgagcaaagtaacaatgataaaagtcattatcattcaaaagcatatattagaggtagtccaaatgtggtggtgattaatgtgagtccaattgaatatgggcatatattattagtccctcgagtgttggattgcataccacaacatttagagactgatacatttcttttggcaatttatatggcagcagaagcaagcagtccattctttcgcttgggctataatagtttgggtgcatttgcaacaataaatcatctccattttcaggcttattatttgggaaattgttttcctgtggagaaagctccaaccaaattaatacttcaccactataaaggttttaaagtatatcaactagaaaactatccagttaagggtattgtttatgaggttggagaaagcaactttgaagaattagcattttatattatcaaggtttgcaaggggcttcaaggacgaaacattccttataatattcttattgctaataaaggatgtcaaatctttttatttccacagtgttatgctgagaaacaagctcgtggtgaggttgatcttgagattttagaaactcaagtgaatcctgcagtgtgggaaataagtggtcacattgttttgaagcggaaagaagattttgagagggccaccgaggagtatgcttggagattactggcagaagtttcagtatcagaaaaagtatttgacgagattatcaaacttgtcttctcctcagcagaagacaaatttgatgctaaactctatcacaagagtttaatctctacagatatcacttattacaccgtgggagagaacgtcattatggtgtag

SEQ ID NO: 147 - protein, 420 aa, Selaginella moellendorffii
MLTIRRIPTIVSNYQESLESKIGCGKNCLGSCCIPGARLPLYLFGNQELDEHGEIQSKELGQNSFLDSAILGQWADKQAEGLFRYDVTACATKVLPGKYGFIAQLNEGRHLKKRPTEFRVDQVLQPFDHKKFNFTKVGQEEMLFCFEQSNNDKSHYHSKAYIRGSPNVVVINVSPIEYGHILLVPRVLDCIPQHLETDTFLLAIYMAAEASSPFFRLGYNSLGAFATINHLHFQAYYLGNCFPVEKAPTKLILHHYKGFKVYQLENYPVKGIVYEVGESNFEELAFYIIKVCKGLQGRNIPYNILIANKGCQIFLFPQCYAEKQARGEVDLEILETQVNPAVWEISGHIVLKRKEDFERATEEYAWRLLAEVSVSEKVFDEIIKLVFSSAEDKFDAKLYHKSLISTDITYYTVGENVIMV

SEQ ID NO: 148 - DNA, 1308 bp, Saccharum officinarum
atggagatgaagctcaccatcaagagggtgcccaccgtcgtctccaactaccaggacgacgccgacaagccgcgcgccggctgcgggaggaactgcctcggcgactgctgcctgcctgcttccaagcttcccctctatgcgttcaagttgaatctggcaaagcgctcgcaggaggatgctgcttcaaccaagctgcttgttgatatcctccttagtgagtgggaagacaggatggcccgaggcttattccgctatgatgtcactgcctgtgagaccaaggtcatccctggcaaccttgggtttgttgcacaactcaatgaagggcgccaccttaagaagcgccctactgagttccgtgtggaccgtgtgctccagccatttgaccctgccaagttcaatttcaccaaagttggccaggaagaggttctcttccaatttgagaatggtgatggtgatgacagctatttcctgaatgacgctccaatcattgctgttgatcgtgctccaaatgttgttgctatcaatgtgagcccaattgaatatggacatgtgcttctcattcctcgtgttctggaccgcctgcctcagaagattgatccagagagtttcttgcttgcactgcaaatggcagctgaggcagctagcccatacttcaggcttggttacaatagcttgggtgcctttgccaccatcaatcacctccactttcaggcatactacttgtcagtgcctttccctgttgaaaaggcagctacccacaagatccctctttctgaggacacaatgaagaatggagtgaccgtgtccaagctgataaattatcctgtgagaggcctggtatttgagggagggaacacacaggacgacctggcaaatgtggtttccaatgcttgcatttggctgcaagacaacaatgtgccttacaatgtgctcatttctgactgtggcaagagggtcttcctgttcccccagtgttatgcagagaagcaggctctgggtgaagtgagccaggagctgctggacactcaggtgaacccagctgtgtgggagatcagtggccacatcgtgctgaagcggaggaacgactatgaggaggcatctgaaacctccgcgtggaagctccttgctgaggtctccctctctgaggagcgcttcgaggaagtgaaggcgtacatattcagtgctgctggcctggttcagtctgacgaggaagaggaggaagccagcgagggcaagggcaccaccacctattctcctgtcccggttacccctctacctgtcgctgaaggctgcctcgtccgccagtga

SEQ ID NO: 149 - protein, 435 aa, Saccharum officinarum
MEMKLTIKRVPTVVSNYQDDADKPRAGCGRNCLGDCCLPASKLPLYAFKLNLAKRSQEDAASTKLLVDILLSEWEDRMARGLFRYDVTACETKVIPGNLGFVAQLNEGRHLKKRPTEFRVDRVLQPFDPAKFNFTKVGQEEVLFQFENGDGDDSYFLNDAPIIAVDRAPNVVAINVSPIEYGHVLLIPRVLDRLPQKIDPESFLLALQMAAEAASPYFRLGYNSLGAFATINHLHFQAYYLSVPFPVEKAATHKIPLSEDTMKNGVTVSKLINYPVRGLVFEGGNTQDDLANVVSNACIWLQDNNVPYNVLISDCGKRVFLFPQCYAEKQALGEVSQELLDTQVNPAVWEISGHIVLKRRNDYEEASETSAWKLLAEVSLSEERFEEVKAYIFSAAGLVQSDEEEEEASEGKGTTTYSPVPVTPLPVAEGCLVRQ

SEQ ID NO: 150 - DNA, 1305 bp, Stevia rebaudiana
atgttgaggatcaaaagggttcctactgtggtttccaactaccaaaaggaagaggccgatgacggtggtgccaccggtggttgtggtcggaattgcatgagagactgttgcctaccaggggcaaagctacctctgtatgctttcagaaaatcagatactattgaatccagtgacaaaaaggatccaccttttgctttcttggattctctcctccttggagagtgggaggatcgaatggagaggggcttgtttcgctatgatgttaccgcttgtgctactaaggtgattccgggaaattacgggtttattgctcagttaaacgagggtcgccacctgaaaaagcgtccaactgagtttcgggtggataaagttcttcaaccgtttgatggaagcaaattcaacttcactaaagtcggtcaagaagagatactttttcagtttgaagcaagcaaagatgatgaagtcaagttttatcccaatgctcctattgatgttgaaagttctcctagtgttgttgccattaatgttagtccgattgaatatggacacgcgcttttgattcctcgaattctcgaatgtttgcctcaaagaattgacaatgaaagcctcttgcttgcactttacatggcatcggaagcagagaatccgtacttccgtttgggttacaatagtttgggtgcttttgctactatcaatcatcttcattttcaggcttattatcttgctgtcccatttccaatcgagaaagccccgactaaaaagattaccgacttcaatggcggagttgtaatttctgagattctcaagtaccctgttagaggccttgtatttgaaggtggatattcacttgaagatctatcaaaagctgtcagtgattcttgcatttgcctccaagaaaacaatattccttataatgttcttatctcagattctggaactcgcgtgtttgttctacctcagtgttacgctgagaaacaagctctaggagaagtccttcctgagcttcttgacacccaagtgaaccctgcggtttgggagataagcggtcacatggttttgaaacgcaaacaagactacgaaggtgccagcgaggataacgcgtggcgacttcttgctgaggtgtcactctctgaggcacggtttcaagaagtggtagccatcatctttgaagccatttcatgtgctgttactgaaagcttgcctgatgaagatggccaagatcttgaagatgttgatgctattaacaatgggtcccaccaaacggccattgttgctggaaaacaggaatgcatggttcaacactag

SEQ ID NO: 151 - protein, 434 aa, Stevia rebaudiana
MLRIKRVPTVVSNYQKEEADDGGATGGCGRNCMRDCCLPGAKLPLYAFRKSDTIESSDKKDPPFAFLDSLLLGEWEDRMERGLFRYDVTACATKVIPGNYGFIAQLNEGRHLKKRPTEFRVDKVLQPFDGSKFNFTKVGQEEILFQFEASKDDEVKFYPNAPIDVESSPSVVAINVSPIEYGHALLIPRILECLPQRIDNESLLLALYMASEAENPYFRLGYNSLGAFATINHLHFQAYYLAVPFPIEKAPTKKITDFNGGVVISEILKYPVRGLVFEGGYSLEDLSKAVSDSCICLQENNIPYNVLISDSGTRVFVLPQCYAEKQALGEVLPELLDTQVNPAVWEISGHMVLKRKQDYEGASEDNAWRLLAEVSLSEARFQEVVAIIFEAISCAVTESLPDEDGQDLEDVDAINNGSHQTAIVAGKQECMVQH

SEQ ID NO: 152 - DNA, 1182 bp, Triticum aestivum
atgcccgtcatctccccccttcctttctcgcttttgccagcgccggctgctcccgcggcgtcgcgagctcgctggaacagcttcccgcaccaccggcttttgcgagcaggcatgtgcagcaacggttttgattcaactaactgccttcgtatggaggaggttgagccgaatttatccccatttctccacaagctttttaaagagtgggatgactgcaaggcgaggggattgtttcaccacaacatcactacctgtgagaccaaggtgctacctggagaacacaattttgttgcaacattgatagaagggcgtgaccagaagaagcggccaactgaatttggaatgaaccaagtcctccaaccatttcatagtgacaagttcaatttcactaaagttaaaccggaggaggtgatcttcaggttccaagaaactgagaatgattctgcccagtattttgacggagctcctcccactgtttcagcttctcctagcagcattttgatcaacgtgagcccaatcgggtactgtcatgtgcttttgacccctcaaatccaggaatgcttaccgcaaagggttgatcaagagagcttcttactggccatgtatgtcgcaagggaggcaaggaatccattcttcagagttggctataacagtctgggtgcctttgcaacaatcaatcacctccatttccaagcatactatctgaaagtgcaatatccagtcgagaatgcgccgacagagagaatcacagtcgtacggaacggcgtcagcatttctcagctggtgcggtacccagtaagcggctttgtttttgaaggcggagcgagcctggaggatctgtcacaggccgtctcagatgcatgtatcttcttgcaagagaataacagacctttcaatgtccttatctctgaatctggcaagagagtattccttctactacagtgctacgctgagaagcaggcttccggaaaggcgagccaggagttcctcgacatgagaatcaatccagcggtctgggagctcagcgggcatttggttttgaagaggaggaaggactacgacgaagcatccgaggcaacactatgcaggtttttggttgaagcgtccctgtctgaagcagagttccaggagctgaagaggtgcctcttggagttcctggccactgcaagtcctgaaaagtag

SEQ ID NO: 153 - protein, 393 aa, Triticum aestivum
MPVISPLPFSLLPAPAAPAASRARWNSFPHHRLLRAGMCSNGFDSTNCLRMEEVEPNLSPFLHKLFKEWDDCKARGLFHHNITTCETKVLPGEHNFVATLIEGRDQKKRPTEFGMNQVLQPFHSDKFNFTKVKPEEVIFRFQETENDSAQYFDGAPPTVSASPSSILINVSPIGYCHVLLTPQIQECLPQRVDQESFLLAMYVAREARNPFFRVGYNSLGAFATINHLHFQAYYLKVQYPVENAPTERITVVRNGVSISQLVRYPVSGFVFEGGASLEDLSQAVSDACIFLQENNRPFNVLISESGKRVFLLLQCYAEKQASGKASQEFLDMRINPAVWELSGHLVLKRRKDYDEASEATLCRFLVEASLSEAEFQELKRCLLEFLATASPEK

SEQ ID NO: 154 - DNA, 1362 bp, Populus trichocarpa
atgatgctaaggatcaagagggttcctactgttgtttccaattaccagaaagaggacggtaatgagggttctcgccgcggagggggctgcggccgcaattgccttcaaaattgttgtcttcaagacgcatgccttcctttatatgctttcaagaaagtggacagtattgtctctgagaagaagggtgtgggtgtgtttgagtatgacaagggggagcctccagttgcattcctcgactcgcttcttcttggggagtgggaggaccgtgtgcagagagggctctttcgctatgatgttactgcctgtgaaaccaaggtgataccgggtcagcatggttttatcgctcagctgaacgagggccgtcacttgaagaagaggccaactgaattccgtgttgataaggttcttcagccctttgacggaaacaaatttaacttcactaaagttggccaagaagaggtgctcttccagtttggtgcaagtgaagatggggaagttcagttcttcccagatgcacctattgatcctgagaattctccaagcatggtcgccatcaatgtgagccctattgaatatgggcatttgctgttaatcccacgtgttctggactgcttgccacagaggattgatcgtgatagcttcatgcttgcaatttacatggcagctgaagctgggaatccatacttccgactgggttacaatagcttgggtgcttttgcaaccattaaccaccttcactttcaggcttactacttggccgtgccatttccgattgagaaggcacccaccaaggagataactacatcggatggtggcgtgaaaatctctgagcttgtgaattatcctgtgagaggcctagtctttgagggtggaaatgccctgctagatttatcaaacggtgtctcggatgcctgcatttgccttcaagaaaacaacataccttacaatgtgctcattgctgattgtggaaaccgtatctttctccttccacagtgttatgctgagaaacaagctctaggggaagtaagtcctgagcttcttgatacccaagtgaaccctgccgtgtgggaaattagtggtcatatggtgttgaagaggaaaaaagactatgaggaggcatctgaagagaatgcttggaggcttcttgcagaggtttctctctctgaagagagattccaagaagtgactgctctcatctttgaagccatttcctaccgtagttgtgtcattggaactgattctgagaacttgctggaggatgtaaatgtggaacatcaacttgtcgaagaagtgaatgctattaatgaaagctcccatcaagccatggttactgggaatcaggattgcctagttctgcattga

SEQ ID NO: 155 - protein, 453 aa, Populus trichocarpa
MMLRIKRVPTVVSNYQKEDGNEGSRRGGGCGRNCLQNCCLQDACLPLYAFKKVDSIVSEKKGVGVFEYDKGEPPVAFLDSLLLGEWEDRVQRGLFRYDVTACETKVIPGQHGFIAQLNEGRHLKKRPTEFRVDKVLQPFDGNKFNFTKVGQEEVLFQFGASEDGEVQFFPDAPIDPENSPSMVAINVSPIEYGHLLLIPRVLDCLPQRIDRDSFMLAIYMAAEAGNPYFRLGYNSLGAFATINHLHFQAYYLAVPFPIEKAPTKEITTSDGGVKISELVNYPVRGLVFEGGNALLDLSNGVSDACICLQENNIPYNVLIADCGNRIFLLPQCYAEKQALGEVSPELLDTQVNPAVWEISGHMVLKRKKDYEEASEENAWRLLAEVSLSEERFQEVTALIFEAISYRSCVIGTDSENLLEDVNVEHQLVEEVNAINESSHQAMVTGNQDCLVLH

SEQ ID NO: 156 - DNA, 1359 bp, Vitis aestivalis
atgaatacgctgaggattaagagggtacccaccgtggtttcgaattaccagaaggaggattcagacgatggtgctcgtcaggttggtggttgcggccgcaattgcctcaagcagtgctgcattcaaggagcaaaactccctctttatgcctacaagaaggtgaaggacgttgttaacgagaaaacttcgagcggtgatgaaaacaaagagcagcctgtgcccttccttgactctctcgttcttggagagtgggaggatcgtatgcagaaagggctctttcgatatgatgtcactgcttgtgaaaccaaggtgattccgggtgagtatgggttcattgcccagctgaatgagggccgccacctgaagaagaggcccactgagttccgtgtggataaagtcctccagccctttgatgggaacaaattcaacttcactaaagttgggcaagaggaggtgctcttccagtttgaaccaagcaatgatgaggaacctgagttcatccccaatgctcccattgatgtcgaaaattctacaagcgttgttgccatcaatgttagtcctattgaatatgggcatgtgcttctaatcccaaggattttcgagtgcttgccgcagaggatcgaccgcaaaagctttttgcttgcccttgacatggctgtggaagcaggaaatccatatttccggttgggttacaacagcttgggtgcatttgctaccatcaaccaccttcactttcaggcttattacttggccacaccctttcccattgagaaggctccaactaggaaaataaccactgcaggcaatggggtgaagatctttgagctgttaaaatatcctgttagaggtcttgtctttgagggtggagacactctgcaagatttagcgaacactgtggccgattcctgcatttgccttcaggataacaacatacctttcaatgttctcattgctgatgctgggaaacgtatctttctttttgcacagtgttatgctgagaaacaagctcttggggaagtgaatcaggagcttctggacacccaagtgaacccagctgtctgggaggttagtggacatattgtgctgaaaaggaaggaggactatgagggggcatctgaggagaatgcttggaggcttcttgctgaggtctctctctctgaagagaggttccaagaagtgaatgctcttatctttgaagccattgcctgtggagatgatgaaaaaggaaatctcaccgaggacatgattgaggggccagatgtcacacctccatctcatgaagatgcaggtgccatcaacaatagctcctaccctgctgccatggtggctggaaagcaagaatgcctagttcagcagtaa

SEQ ID NO: 157 - protein, 452 aa, Vitis aestivalis
MNTLRIKRVPTVVSNYQKEDSDDGARQVGGCGRNCLKQCCIQGAKLPLYAYKKVKDVVNEKTSSGDENKEQPVPFLDSLVLGEWEDRMQKGLFRYDVTACETKVIPGEYGFIAQLNEGRHLKKRPTEFRVDKVLQPFDGNKFNFTKVGQEEVLFQFEPSNDEEPEFIPNAPIDVENSTSVVAINVSPIEYGHVLLIPRIFECLPQRIDRKSFLLALDMAVEAGNPYFRLGYNSLGAFATINHLHFQAYYLATPFPIEKAPTRKITTAGNGVKIFELLKYPVRGLVFEGGDTLQDLANTVADSCICLQDNNIPFNVLIADAGKRIFLFAQCYAEKQALGEVNQELLDTQVNPAVWEVSGHIVLKRKEDYEGASEENAWRLLAEVSLSEERFQEVNALIFEAIACGDDEKGNLTEDMIEGPDVTPPSHEDAGAINNSSYPAAMVAGKQECLVQQ

SEQ ID NO: 158 - DNA, 1176 bp, Volvox carteri
atgggaagttccttggcggacgactgttcctcgtactccgcattttcgtcttctattgctgttagcggcagcgaggatggaaaggttctggaagttcccagccgcagcctcctggaatcggccctcatgactctctgggaggacagagcggaccggggcctctttcgctacgatgtcacgctgtgtcctacacgcgtgttgccgggctcgcgaggcttcatcgcacagctcaacgagggccgggccacaaagaaacgccccactgaggtcacgttggaccgagttttgcagcctttcgactccgctaagttcaattttaagaaagctgccatggcggaggcgctcgtcgggttctttcccgacgatgctggcagtggcggcggcgctggtggcggcaatggcggccgcagcttgctgccatccgtggcgccgctgggcgccgccgcagtggccgcgggcggcagtccgaacctggtcctcatcaacgtgtcgcctatcgattatggccacgtgctgctggtgccgcgggttctggacaatctgccgcaggcgctaagctgcgggacggtgctcctggcgctgcaattcgctggggagctggggaactcgcacttccgagtgggctacaactccctgggtgcctacgcgaccattaaccacttgcatttccagtcgtacttcttggccaagaccatgccatgcgaggcggctgcaacggtgccgctgcccggagtcggcgtgctagccggtgctgctgtacgcgtgtcgcgcctcgtggattaccccgtcaatgcgtttgttatcgaggccttaacctccttggagacgagtttatacgactgtgcggagcggctacaggcggccaaccagccgtttaacctgctcatctcagacgctggtcgccgggtttttctgtttcctcagtgctttgcggagcgccaggcggcgggccttatcccgccggagcttctcgaaacgggcgtgaatccagccgcgtttgagattgctggacatctggtcctgaagcgcacgcaggactacacggaggcgacggaggacttggcaatgcagctgctggcgcaggcgtcgttatcggaggaaaggttcatgagcttggcacgtctgtgctttggcggtgctgctggcgcagacatctgtggcgccgccttacagtga

SEQ ID NO: 159 - protein, 391 aa, Volvox carteri
MGSSLADDCSSYSAFSSSIAVSGSEDGKVLEVPSRSLLESALMTLWEDRADRGLFRYDVTLCPTRVLPGSRGFIAQLNEGRATKKRPTEVTLDRVLQPFDSAKFNFKKAAMAEALVGFFPDDAGSGGGAGGGNGGRSLLPSVAPLGAAAVAAGGSPNLVLINVSPIDYGHVLLVPRVLDNLPQALSCGTVLLALQFAGELGNSHFRVGYNSLGAYATINHLHFQSYFLAKTMPCEAAATVPLPGVGVLAGAAVRVSRLVDYPVNAFVIEALTSLETSLYDCAERLQAANQPFNLLISDAGRRVFLFPQCFAERQAAGLIPPELLETGVNPAAFEIAGHLVLKRTQDYTEATEDLAMQLLAQASLSEERFMSLARLCFGGAAGADICGAALQ

SEQ ID NO: 160 - DNA, 1359 bp, Vitis shuttleworthii
atgaatacgctgaggattaagagggtacccaccgtggtttcgaattaccagaaggaggattcagacgatggtgctcgtcaggttggtggttgcggccgcaattgcctcaagcagtgctgcattcaaggagcaaaactccctctttatgcctacaagaaggtgaaggacgttgttaacgagaaagcttcgagcggtgatgaaaacaaagagcagcctgtgcccttccttgactctctcgttcttggagagtgggaggatcgtatgcagaaagggctctttcgatatgatgtcactgcttgtgaaaccaaggtgattccgggtgagtatgggttcattgcccagctgaatgagggccgccacctgaagaagaggcccactgagttccgtgtggataaagtcctccagccctttgatgggaacaaattcaacttcactaaagttgggcaagaggaggtgctcttccagtttgaaccaagcaatgatgaggaacctgagttcatccccaatgctcccattgatgtcgaaaattctacaagcgttgttgccatcaatgttagtcccattgaatatgggcatgtgcttctaatcccaaggattttcgagtgcttgccgcagaggattgaccgggaaagctttttgcttgcccttgacatggctgtggaagcaggaaacccatatttccggttgggttacaacagcttgggtgcatttgctaccatcaaccaccttcactttcaggcttattacttggccacaccctttcccattgagaaggctccaactaggaaaataaccactgcaggcaatggggtgaagatcttcgagctgttaaaatatcctgttagaggtcttgtcttcgagggtggagacactctgcaagatttagcgaacactgtggccgattcctgcatttgccttcaggataacaacatacctttcaatgttctcattgctgatgctgggaaacgtatctttctctttgcacagtgttatgctgagaaacaagctcttggggaagtgaatcaggagcttctggacacccaagtgaacccagctgtctgggaggttagtggacatattgtgctgaaaaggaaggaggactatgagggggcatctgaggagaatgcttggaggcttcttgctgaggtctctctctctgaagagaggttccaagaagtgaatgctcttatctttgaagccattgcctgtggagatgatgaaaaaggaaatctcaccgaggacatgattgaggagccagatgtcacacctccatctcatgaagatgcaggtgccataaaaaatagctcctaccctgctgccatggtggctggaaagcaagaatgcctagttcagcagtaa

SEQ ID NO: 161 - protein, 452 aa, Vitis shuttleworthii
MNTLRIKRVPTVVSNYQKEDSDDGARQVGGCGRNCLKQCCIQGAKLPLYAYKKVKDVVNEKASSGDENKEQPVPFLDSLVLGEWEDRMQKGLFRYDVTACETKVIPGEYGFIAQLNEGRHLKKRPTEFRVDKVLQPFDGNKFNFTKVGQEEVLFQFEPSNDEEPEFIPNAPIDVENSTSVVAINVSPIEYGHVLLIPRIFECLPQRIDRESFLLALDMAVEAGNPYFRLGYNSLGAFATINHLHFQAYYLATPFPIEKAPTRKITTAGNGVKIFELLKYPVRGLVFEGGDTLQDLANTVADSCICLQDNNIPFNVLIADAGKRIFLFAQCYAEKQALGEVNQELLDTQVNPAVWEVSGHIVLKRKEDYEGASEENAWRLLAEVSLSEERFQEVNALIFEAIACGDDEKGNLTEDMIEEPDVTPPSHEDAGAIKNSSYPAAMVAGKQECLVQQ

SEQ ID NO: 162 - DNA, 1359 bp, Vitis vinifera
atgaatacgctgaggattaagagggtacccaccgtggtttcgaattaccagaaggaggattcagacgatggtgctcgtcaggttggtggttgcggccgcaattgcctcaagcagtgctgcattcaaggagcaaaactccctctttatgcctacaagaaggtgaaggacgttgttaacgagaaagcttcgagcggtgatgaaaacaaagagcagcctgtgcccttccttgactctctcgttcttggagagtgggaggatcgtatgcagaaagggctctttcgatatgatgtcactgcttgcgaaaccaaggtgattccgggtgagtatgggttcattgcccagctgaatgagggccgccacctgaagaagaggcccactgagttccgtgtggataaagtcctccagccctttgatgggaacaaattcaacttcactaaagttgggcaagaggaggtgctcttccagtttgaaccaagcaatgatgaggaacctgagttcatccccaatgctcccattgatgtcgaaaattctacaagcgttgttgccatcaatgttagtcctattgaatatgggcatgtgcttctaatcccaaggattttcgagtgcttgccgcagaggatcgaccgcgaaagctttttgcttgcccttgacatggctgtggaagcaggaaatccatatttccggttgggttacaacagcttgggtgcatttgctaccatcaaccaccttcactttcaggcttattacttggccacaccctttcccattgagaaggctccaactaggaaaataaccactgcaggcaatggggtgaagatctttgagctgttaaaatatcctgttagaggtcttgtctttgagggtggagacactctgcaagatttagcgaacactgtggccgattcctgcatttgccttcaggataacaacatacctttcaatgttctcattgctgatgctgggaaacgtatctttctctttgcacagtgttatgctgagaaacaagctcttggggaagtgaatcaggagcttctggacacccaagtgaacccagctgtctgggaggttagtggacatattgtgctgaaaaggaaggaggactatgagggggcatctgagcagaatgcttggaggcttcttgctgaggtctctctctctgaagagaggttccaagaagtgaatgctcttatctttgaagccattgcctgtggagatgatgaaaaaggaaatctcaccgaggacatgattgaggagccagatgtcacacctccatctcatgaagatgcaggtgccatcaacaatagctcctaccctgctgccatggtggctggaaagcaagaatgcctagttcagcagtaa

SEQ ID NO: 163 - protein, 452 aa, Vitis vinifera
MNTLRIKRVPTVVSNYQKEDSDDGARQVGGCGRNCLKQCCIQGAKLPLYAYKKVKDVVNEKASSGDENKEQPVPFLDSLVLGEWEDRMQKGLFRYDVTACETKVIPGEYGFIAQLNEGRHLKKRPTEFRVDKVLQPFDGNKFNFTKVGQEEVLFQFEPSNDEEPEFIPNAPIDVENSTSVVAINVSPIEYGHVLLIPRIFECLPQRIDRESFLLALDMAVEAGNPYFRLGYNSLGAFATINHLHFQAYYLATPFPIEKAPTRKITTAGNGVKIFELLKYPVRGLVFEGGDTLQDLANTVADSCICLQDNNIPFNVLIADAGKRIFLFAQCYAEKQALGEVNQELLDTQVNPAVWEVSGHIVLKRKEDYEGASEQNAWRLLAEVSLSEERFQEVNALIFEAIACGDDEKGNLTEDMIEEPDVTPPSHEDAGAINNSSYPAAMVAGKQECLVQQ

SEQ ID NO: 164 - DNA, 1077 bp, Zea mays
atgctttcagctgcaacaaaactaaccatggatggcactagctttgacctgacagagcacgaaggttcaaatttgtctccgtttctactcaaactttttaatgagtgggatgatcgcaagacaaggggcttgtttcaccatgacatcagttcctgtgaaacaaaggtgctacctggagtacataattttgtggcaacattaattgaaggacgtgaccaaaagaagcggccaactgagttcacaatgaaccaagttctccagccatttgttagtgagaagttcaatttcacaaaagtcagcccgttggaggtgatctttagattcaatgacactgagaaagaccctgcacaatattttgatggtgttcctgatactgtttcagcttcttctagtgccatcttgattaatgtgagcccaattggctactgccatgtgctattgactcccaagatccaggactgtttgccgcaaaggattgatcaagagagcttcttaatagccatgtatgttgcaagagaagcaaggactcccttcttcagagttggttataacagcctgggcggctttgcaactatcaaccaccttcacttccaggcatactacctgaaagtacagtatccagttgaaaaggcaatcacggagaagctcaagaccctagggaatagcgtgagcatttttcacctggtggattacccagtcaatggctttgtgttcgaaggtggtgcgagcctggaagatttgtcagatgtggtctccaaagtctgcatcttcctgcaagagaacaacagacctttcaatgtcctcatctctgaatctggcaagagaattttccttctaccacagtgctatgcggagaagcagctcctcggaaaggcgagccaagagttcctcgacatgagaatcaatccagcaatctgggagctcagtggccatctggtactgaagcggaggaaggactacgaggaggcctctgaagcaaacatatgcaggtttttggttgaagcagctctttctgaaacagaatttcaggagctgaaccgatgcgtgctcgacttcctgaccagctctcttggttga

SEQ ID NO: 165 - protein, 358 aa, Zea mays
MLSAATKLTMDGTSFDLTEHEGSNLSPFLLKLFNEWDDRKTRGLFHHDISSCETKVLPGVHNFVATLIEGRDQKKRPTEFTMNQVLQPFVSEKFNFTKVSPLEVIFRFNDTEKDPAQYFDGVPDTVSASSSAILINVSPIGYCHVLLTPKIQDCLPQRIDQESFLIAMYVAREARTPFFRVGYNSLGGFATINHLHFQAYYLKVQYPVEKAITEKLKTLGNSVSIFHLVDYPVNGFVFEGGASLEDLSDVVSKVCIFLQENNRPFNVLISESGKRIFLLPQCYAEKQLLGKASQEFLDMRINPAIWELSGHLVLKRRKDYEEASEANICRFLVEAALSETEFQELNRCVLDFLTSSLG

SEQ ID NO: 166 - DNA, 1308 bp, Zea mays
atggagatgaagctgaccatcaggagggtgcccaccgtcgtctccaactaccaggaggacgccgacaagccgcgcgcgggctgcgggaggaactgcctcggcgactgctgcctgcctgcttccaagcttcccctctacgcgttcaagttgactccggcaaagggctcgcaggaggatgctgcttcaaccaagttacttgttgatattctccttagtgagtgggaggacaggatgactcgaggcttattccgctacgatgtcactgcctgtgagaccaaggtcattcctggcaaccttgggtttgttgcacaactcaatgaagggcgccatcttaagaagcgccctactgagtttcgtgtggaccgtgtgctccagccgtttgaccctgccaaattcaatttcacaaaagttggccaggaagaggttctcttccaatttgagaatagtggtggtgatgacagctatttcctgaacaacgctccaatcattgctgttgatcgggctccaaatgttattgctatcaatgtaagcccaattgaatatggacatgtgcttctcattcctcgtgttctggaccgcctgcctcagaggattgatccagagagcttcttgcttgcactgcaaatggcagccgagggaggtagcccatacttcaggcttggttacaatagcttgggtgcgtttgccaccatcaatcacctccactttcaggcgtactacttgtcagtgcctttccctgttgagaaggcagctacccacaagatcccactctctgaggacacgaagaagaatggggtgaccgtgtccaagctgataaattatcctgtgagaggcctggtatttgagggagggaacaccctggacgacctggccactgtggtttctaatgcttgcatttggctgcaagacaacaatgtgccttacaatgtgctcatttctgactgtggcaagagggttttcctgttcccccagtgctacgcagagaagcaggctctgggtgaagtgagccaggagctgctggacactcaggtgaacccagctgtgtgggagatcagtggacacatggtgctgaaacggaggatggactatgaggaggcatctgaaacctccgcgtggaaactcctcgccgaggtctctctctccgaggagcgcttcgaggaagtgaaggcgtacatcttcagcgctgctggcctggttcagtatgatgaggaagaggaggaagccagcgacggtgagggccctacggcctatgttcctgtcaaggttacccctctgcccgtcgctgaagggtgcctcgtcctcccgtga

SEQ ID NO: 167 - protein, 435 aa, Zea mays
MEMKLTIRRVPTVVSNYQEDADKPRAGCGRNCLGDCCLPASKLPLYAFKLTPAKGSQEDAASTKLLVDILLSEWEDRMTRGLFRYDVTACETKVIPGNLGFVAQLNEGRHLKKRPTEFRVDRVLQPFDPAKFNFTKVGQEEVLFQFENSGGDDSYFLNNAPIIAVDRAPNVIAINVSPIEYGHVLLIPRVLDRLPQRIDPESFLLALQMAAEGGSPYFRLGYNSLGAFATINHLHFQAYYLSVPFPVEKAATHKIPLSEDTKKNGVTVSKLINYPVRGLVFEGGNTLDDLATVVSNACIWLQDNNVPYNVLISDCGKRVFLFPQCYAEKQALGEVSQELLDTQVNPAVWEISGHMVLKRRMDYEEASETSAWKLLAEVSLSEERFEEVKAYIFSAAGLVQYDEEEEEASDGEGPTAYVPVKVTPLPVAEGCLVLP

SEQ ID NO: 168 - protein, 50 aa, Artificial sequence
  motif 4
  VARIANT (5)..(5): / replace = "Phe" / replace = "Val"
  VARIANT (6)..(6): / replace = "Ala"
  VARIANT (25)..(25): / replace = "Glu"
  VARIANT (26)..(26): / replace = "Tyr"
  VARIANT (29)..(29): / replace = "Val"
  VARIANT (49)..(49): / replace = "Arg" / replace = "Gln"
WEDRMQRGLFRYDVTACETKVIPGKLGFIAQLNEGRHLKKRPTEFRVDKV

SEQ ID NO: 169 - protein, 50 aa, Artificial sequence
  motif 5
  VARIANT (1)..(1): / replace = "Glu"
  VARIANT (2)..(2): / replace = "Arg"
  VARIANT (6)..(6): / replace = "Arg"
  VARIANT (9)..(9): / replace = "Pro" / replace = "Arg"
  VARIANT (10)..(10): / replace = "Lys" / replace = "Asp"
  VARIANT (12)..(12): / replace = "Leu"
  VARIANT (16)..(16): / replace = "Leu"
  VARIANT (17)..(17): / replace = "Tyr" / replace = "Gln"
  VARIANT (23)..(23): / replace = "Ala"
  VARIANT (24)..(24): / replace = "Ser"
  VARIANT (29)..(29): / replace = "Val"
DCLPQQIDHESFLLAVHMAAEAGNPYFRLGYNSLGAFATINHLHFQAYYL

SEQ ID NO: 170 - protein, 50 aa, Artificial sequence
  motif 6
  VARIANT (2)..(2): / replace = "Ser"
  VARIANT (4)..(4): / replace = "Arg"
  VARIANT (5)..(5): / replace = "Arg"
  VARIANT (6)..(6): / replace = "Val"
  VARIANT (8)..(8): / replace = "Leu"
  VARIANT (9)..(9): / replace = "Met" / replace = "Phe"
  VARIANT (24)..(24): / replace = "Gln"
  VARIANT (25)..(25): / replace = "Glu"
  VARIANT (26)..(26): / replace = "Leu"
  VARIANT (28)..(28): / replace = "Glu"
  VARIANT (42)..(42): / replace = "Ile"
  VARIANT (47)..(47): / replace = "Arg"
  VARIANT (48)..(48): / replace = "Thr" / replace = "Lys"
  VARIANT (50)..(50): / replace = "Tyr"
DCGKQIFVLPQCYAEKQALGEVSPDVLDTQVNPAVWEISGHMVLKRKEDF

SEQ ID NO: 171 - protein, 50 aa, Artificial sequence
  motif 7
  VARIANT (5)..(5): / replace = "Val" / replace = "Met"
  VARIANT (6)..(6): / replace = "Ala"
  VARIANT (25)..(25): / replace = "Glu"
  VARIANT (26)..(26): / replace = "Leu" / replace = "His"
  VARIANT (29)..(29): / replace = "Val"'
  VARIANT (49)..(49): / replace = "Lys"
WEDRFQRGLFRYDVTACETKVIPGKYGFIAQLNEGRHLKKRPTEFRVDRV

SEQ ID NO: 172 - protein, 50 aa, Artificial sequence
  motif 8
  VARIANT (1)..(1): / replace = "Glu"
  VARIANT (2)..(2): / replace = "Arg"
  VARIANT (6)..(6): / replace = "Arg"
  VARIANT (9)..(9): / replace = "Pro" / replace = "Arg"
  VARIANT (10)..(10): / replace = "Glu"
  VARIANT (12)..(12): / replace = "Leu"
  VARIANT (16)..(16): / replace = "Leu"
  VARIANT (17)..(17): / replace = "Tyr"
  VARIANT (23)..(23): / replace = "Gly"
  VARIANT (24)..(24): / replace = "Ser"
DCLPQQIDHKSFLLAVHMAAEAANPYFRLGYNSLGAFATINHLHFQAYYL

SEQ ID NO: 173 - protein, 50 aa, Artificial sequence
  motif 9
  VARIANT (14)..(14): / replace = "Pro"
  VARIANT (32)..(32): / replace = "Ile"
  VARIANT (37)..(37): / replace = "Arg"
  VARIANT (38)..(38): / replace = "Thr" / replace = "Glu"
  VARIANT (40)..(40): / replace = "Tyr"
  VARIANT (41)..(41): / replace = "Asp"
  VARIANT (42)..(42): / replace = "Gly"
  VARIANT (46)..(46): / replace = "Asp" / replace = "Ala"
  VARIANT (47)..(47): / replace = "Asn"
QCYAEKQALGEVSQELLDTQVNPAVWEISGHMVLKRKKDFEEASEESAWR

SEQ ID NO: 174 - protein, 50 aa, Artificial sequence
  motif 10
  VARIANT (2)..(2): / replace = "Cys"
  VARIANT (6)..(6): / replace = "Arg"
  VARIANT (7)..(7): / replace = "Val"
  VARIANT (9)..(9): / replace = "Gln"
  VARIANT (16)..(16): / replace = "Met"
  VARIANT (17)..(17): / replace = "His" / replace = "Gln"
  VARIANT (18)..(18): / replace = "Val"
  VARIANT (20)..(20): / replace = "Arg"
  VARIANT (23)..(23): / replace = "Arg"
  VARIANT (24)..(24): / replace = "Asn"
  VARIANT (26)..(26): / replace = "Phe"
  VARIANT (29)..(29): / replace = "Val"
  VARIANT (36)..(36): / replace = "Gly"
DRLPQQIDPESFLLALYMAAEAASPYFRLGYNSLGAFATINHLHFQAYYL

SEQ ID NO: 175 - protein, 50 aa, Artificial sequence
  motif 11
  VARIANT (2)..(2): / replace = "Asp"
  VARIANT (5)..(5): / replace = "Val" / replace = "Met"
  VARIANT (6)..(6): / replace = "Thr"
  VARIANT (11)..(11): / replace = "His"
  VARIANT (12)..(12): / replace = "His"
  VARIANT (14)..(14): / replace = "Ile"
  VARIANT (15)..(15): / replace = "Ser"
  VARIANT (16)..(16): / replace = "Ser"
  VARIANT (22)..(22): / replace = "Leu"
  VARIANT (25)..(25): / replace = "Asn"
  VARIANT (26)..(26): / replace = "His"
  VARIANT (27)..(27): / replace = "Asn"
  VARIANT (31)..(31): / replace = "Thr"
  VARIANT (33)..(33): / replace = "Ile"
  VARIANT (37)..(37): / replace = "Asp"
  VARIANT (38)..(38): / replace = "Gln"
  VARIANT (46)..(46): / replace = "Gly"
  VARIANT (47)..(47): / replace = "Met"
  VARIANT (48)..(48): / replace = "Asn"
  VARIANT (49)..(49): / replace = "Gln"
WEDRKARGLFRYDVTACETKVIPGELGFVAQLNEGRHLKKRPTEFRVDRV

SEQ ID NO: 176 - protein, 50 aa, Artificial sequence
  motif 12
  VARIANT (12)..(12): / replace = "Lys"
  VARIANT (13)..(13): / replace = "Ala"
  VARIANT (16)..(16): / replace = "Glu"
  VARIANT (17)..(17): / replace = "Phe"
  VARIANT (20)..(20): / replace = "Met"
  VARIANT (21)..(21): / replace = "Arg"
  VARIANT (22)..(22): / replace = "Ile"
  VARIANT (29)..(29): / replace = "Leu"
  VARIANT (33)..(33): / replace = "Leu"
  VARIANT (39)..(39): / replace = "Lys"
  VARIANT (41)..(41): / replace = "Tyr"
  VARIANT (42)..(42): / replace = "Asp"
  VARIANT (47)..(47): / replace = "Thr"
  VARIANT (48)..(48): / replace = "Thr"
  VARIANT (49)..(49): / replace = "Ile"
  VARIANT (50)..(50): / replace = "Cys"
PQCYAEKQALGEVSQDLLDTQVNPAVWEISGHIVLKRRTDFEEASEASAW

SEQ ID NO: 177 - protein, 50 aa, Artificial sequence
  motif 13
  VARIANT (5)..(5): / replace = "Met"
  VARIANT (25)..(25): / replace = "Glu"
  VARIANT (29)..(29): / replace = "Val"
WEDRFQRGLFRYDVTACETKVIPGKYGFIAQLNEGRHLKKRPTEFRVDKV

SEQ ID NO: 178 - protein, 50 aa, Artificial sequence
  motif 14
  VARIANT (8)..(8): / replace = "Arg"
  VARIANT (9)..(9): / replace = "Asp" / replace = "Lys"
  VARIANT (11)..(11): / replace = "Leu"
  VARIANT (15)..(15): / replace = "Leu"
  VARIANT (16)..(16): / replace = "Tyr"
  VARIANT (22)..(22): / replace = "Ala"
  VARIANT (23)..(23): / replace = "Ser"
CLPQRIDHESFLLAVHMAAEAGNPYFRLGYNSLGAFATINHLHFQAYYLA

SEQ ID NO: 179 - protein, 50 aa, Artificial sequence
  motif 15
  VARIANT (14)..(14): / replace = "Ala" / replace = "Gln" / replace = "Ser"
  VARIANT (16)..(16): / replace = "Leu"
  VARIANT (18)..(18): / replace = "Asp"
  VARIANT (32)..(32): / replace = "Ile"
  VARIANT (38)..(38): / replace = "Lys"
  VARIANT (42)..(42): / replace = "Gly"
  VARIANT (46)..(46): / replace = "Glu"
QCYAEKQALGEVSPEVLETQVNPAVWEISGHMVLKRKEDYEEASEDNAWR

SEQ ID NO: 180 - DNA, 2194 bp, Oryza sativa; identical to SEQ ID NO: 57

SEQ ID NO: 181 - DNA, 3906 bp, Artificial sequence
  expression cassette comprising SEQ ID NO: 60
aatccgaaaagtttctgcaccgttttcaccccctaactaacaatatagggaacgtgtgctaaatataaaatgagaccttatatatgtagcgctgataactagaactatgcaagaaaaactcatccacctactttagtggcaatcgggctaaataaaaaagagtcgctacactagtttcgttttccttagtaattaagtgggaaaatgaaatcattattgcttagaatatacgttcacatctctgtcatgaagttaaattattcgaggtagccataattgtcatcaaactcttcttgaataaaaaaatctttctagctgaactcaatgggtaaagagagagattttttttaaaaaaatagaatgaagatattctgaacgtattggcaaagatttaaacatataattatataattttatagtttgtgcattcgtcatatcgcacatcattaaggacatgtcttactccatcccaatttttatttagtaattaaagacaattgacttatttttattatttatcttttttcgattagatgcaaggtacttacgcacacactttgtgctcatgtgcatgtgtgagtgcacctcctcaatacacgttcaactagcaacacatctctaatatcactcgcctatttaatacatttaggtagcaatatctgaattcaagcactccaccatcaccagaccacttttaataatatctaaaatacaaaaaataattttacagaatagcatgaaaagtatgaaacgaactatttaggtttttcacatacaaaaaaaaaaagaattttgctcgtgcgcgagcgccaatctcccatattgggcacacaggcaacaacagagtggctgcccacagaacaacccacaaaaaacgatgatctaacggaggacagcaagtccgcaacaaccttttaacagcaggctttgcggccaggagagaggaggagaggcaaagaaaaccaagcatcctcctcctcccatctataaattcctccccccttttcccctctctatataggaggcatccaagccaagaagagggagagcaccaaggacacgcgactagcagaagccgagcgaccgccttcttcgatccatatcttccggtcgagttcttggtcgatctcttccctcctccacctcctcctcacagggtatgtgcccttcggttgttcttggatttattgttctaggttgtgtagtacgggcgttgatgttaggaaaggggatctgtatctgtgatgattcctgttcttggatttgggatagaggggttcttgatgttgcatgttatcggttcggtttgattagtagtatggttttcaatcgtctggagagctctatggaaatgaaatggtttagggtacggaatcttgcgattttgtgagtaccttttgtttgaggtaaaatcagagcaccggtgattttgcttggtgtaataaaagtacggttgtttggtcctcgattctggtagtgatgcttctcgatttgacgaagctatcctttgtttattccctattgaacaaaaataatccaactttgaagacggtcccgttgatgagattgaatgattgattcttaagcctgtccaaaatttcgcagctggcttgtttagatacagtagtccccatcacgaaattcatggaaacagttataatcctcaggaacaggggattccctgttcttccgatttgctttagtcccagaattttttttcccaaatatcttaaaaagtcactttctggttcagttcaatgaattgattgctacaaataatgcttttatagcgttatcctagctgtagttcagttaataggtaatacccctatagtttagtcaggagaagaacttatccgatttctgatctccatttttaattatatgaaatgaactgtagcataagcagtattcatttggattattttttttattagctctcaccccttcattattctgagctgaaagtctggcatgaactgtcctcaattttgttttcaaattcacatcgattatctatgcattatcctcttgtatctacctgtagaagtttctttttggttattccttgactgcttgattacagaaagaaatttatgaagctgtaatcgggatagttatactgcttgttcttatgattcatttcctttgtgcagttcttggtgtagcttgccactttcaccagcaaagttcatttaaatcaactagggatatcacaagtttgtacaaaaaagcaggcttaaacaatgttgaaaatcaaaagagttccgaccgttgtttcgaactaccagaaggacgatggagcggaggatcccgtcggctgtggacggaattgcctcggcgcttgttgccttaacggggctaggcttccattgtatgcatgtaagaatctggtaaaatccggagagaagcttgtaatcagtcatgaggctatagagcctcctgtagcttttctcgagtcccttgttctcggagggtgggaggataggttccaaagaggactttttcgctatgatgtcactgcctgcgaaaccaaagttatcccggggaagtatggtttcgttgctcagcttaacgagggtcgtcacttgaagaagaggccaactgagttccgtgtagataaggtgttgcagtcttttgatggcagcaaattcaacttcactaaagttggccaagaagagttgctcttccagtttgaagctggtgaagatgcccaagttcagttcttcccttgcatgcctattgaccctgagaattctcccagtgttgttgccatcaatgttagtccgatagagtatggccatgtgctgctgattcctcgtgttcttgactgcttgcctcaaaggatcgatcacaaaagccttttgcttgcagttcacatggctgctgaggctgctaatccatacttcagactcggttacaacagcttgggtgcttttgccactatcaatcatctccactttcaggcttattacttggccatgcctttcccactggagaaagctcctaccaagaagataactaccactgttagtggtgtcaaaatctcagagcttctaagttaccctgtgagaagtcttctctttgaaggtggaagctctatgcaagaactatctgatactgtttcagactgctgtgtttgccttcaaaacaacaacattcctttcaacattctcatctctgattgtggaaggcagatcttcttaatgccacagtgttacgcagagaaacaggctctaggtgaagtgagcccggaggtattggaaacacaagtgaacccagccgtgtgggagataagtggtcacatggtactgaagaggaaagaggattacgaaggtgcttcagaggataacgcgtggaggctccttgcggaagcttctctgtcggaggaaaggtttaaggaggttactgctctcgcctttgaagccataggttgtagtaaccaagaggaggatcttgaaggaaccatagttcatcagcaaaactctagtggcaatgttaaccagaaaagcaacagaacccttggaggtccgatcacaaatgggacggccgccgagtgccttgtccttcagtgaacaatatggtgacttggtggtttgtatgtatacccagctttcttgtacaaagtggtgatatcacaagcccgggcggtcttctagggataacagggtaattatatccctctagatcacaagcccgggcggtcttctacgatgattgagtaataatgtgtcacgcatcaccatgggtggcagtgtcagtgtgagcaatgacctgaatgaacaattgaaatgaaaagaaaaaaagtactccatctgttccaaattaaaattcattttaaccttttaataggtttatacaataattgatatatgttttctgtatatgtctaatttgttatcatcc

SEQ ID NO: 182 - DNA, 3877 bp, Artificial sequence
  expression cassette comprising SEQ ID NO: 62
aatccgaaaagtttctgcaccgttttcaccccctaactaacaatatagggaacgtgtgctaaatataaaatgagaccttatatatgtagcgctgataactagaactatgcaagaaaaactcatccacctactttagtggcaatcgggctaaataaaaaagagtcgctacactagtttcgttttccttagtaattaagtgggaaaatgaaatcattattgcttagaatatacgttcacatctctgtcatgaagttaaattattcgaggtagccataattgtcatcaaactcttcttgaataaaaaaatctttctagctgaactcaatgggtaaagagagagattttttttaaaaaaatagaatgaagatattctgaacgtattggcaaagatttaaacatataattatataattttatagtttgtgcattcgtcatatcgcacatcattaaggacatgtcttactccatcccaatttttatttagtaattaaagacaattgacttatttttattatttatcttttttcgattagatgcaaggtacttacgcacacactttgtgctcatgtgcatgtgtgagtgcacctcctcaatacacgttcaactagcaacacatctctaatatcactcgcctatttaatacatttaggtagcaatatctgaattcaagcactccaccatcaccagaccacttttaataatatctaaaatacaaaaaataattttacagaatagcatgaaaagtatgaaacgaactatttaggtttttcacatacaaaaaaaaaaagaattttgctcgtgcgcgagcgccaatctcccatattgggcacacaggcaacaacagagtggctgcccacagaacaacccacaaaaaacgatgatctaacggaggacagcaagtccgcaacaaccttttaacagcaggctttgcggccaggagagaggaggagaggcaaagaaaaccaagcatcctcctcctcccatctataaattcctccccccttttcccctctctatataggaggcatccaagccaagaagagggagagcaccaaggacacgcgactagcagaagccgagcgaccgccttcttcgatccatatcttccggtcgagttcttggtcgatctcttccctcctccacctcctcctcacagggtatgtgcccttcggttgttcttggatttattgttctaggttgtgtagtacgggcgttgatgttaggaaaggggatctgtatctgtgatgattcctgttcttggatttgggatagaggggttcttgatgttgcatgttatcggttcggtttgattagtagtatggttttcaatcgtctggagagctctatggaaatgaaatggtttagggtacggaatcttgcgattttgtgagtaccttttgtttgaggtaaaatcagagcaccggtgattttgcttggtgtaataaaagtacggttgtttggtcctcgattctggtagtgatgcttctcgatttgacgaagctatcctttgtttattccctattgaacaaaaataatccaactttgaagacggtcccgttgatgagattgaatgattgattcttaagcctgtccaaaatttcgcagctggcttgtttagatacagtagtccccatcacgaaattcatggaaacagttataatcctcaggaacaggggattccctgttcttccgatttgctttagtcccagaattttttttcccaaatatcttaaaaagtcactttctggttcagttcaatgaattgattgctacaaataatgcttttatagcgttatcctagctgtagttcagttaataggtaatacccctatagtttagtcaggagaagaacttatccgatttctgatctccatttttaattatatgaaatgaactgtagcataagcagtattcatttggattattttttttattagctctcaccccttcattattctgagctgaaagtctggcatgaactgtcctcaattttgttttcaaattcacatcgattatctatgcattatcctcttgtatctacctgtagaagtttctttttggttattccttgactgcttgattacagaaagaaatttatgaagctgtaatcgggatagttatactgcttgttcttatgattcatttcctttgtgcagttcttggtgtagcttgccactttcaccagcaaagttcatttaaatcaactagggatatcacaagtttgtacaaaaaagcaggcttaaacaatggagatgaagctgacgattaagagggttccgacggtgctgtccaactaccaggaagaaggaggcgggggctgcggcaggaactgcctcggggattgctgcttgcctgcttccaagctccccctctatgctttcaaggccgacccaaagaagcctgcgcaggatgatgagctccctaccgagttcttcctaaattctctcctccttgcacagtgggaggacagggtggcccgaggcctattcagatatgacgtaacagcctgcgagaccaaggtgattcctggcgagcttgggtttgttgcacagcttaacgaaggccgccacctcaagaagcgcccgaccgagttccgtgttgaccgtgtgctccagccattcgattctgccaagttcaacttcaccaaggttggccaggaggaggttctctttcgctttgagaaaggtggtggcgacagcagctatttccttgaaaatgccccaagcactgagggtgaccatgctcccagcgttgttgcaatcaatgtgagccctattgagtacggtcatgtgcttctcattccacgtgtccttgaccgcctgcctcagcaaattgatcctgaaagcttcctgcttgcactacacatggcagctgaggctgcaagcccatactttaggcttggttacaacagcttgggtgcctttgccaccatcaatcatctccacttccaggcatactacctgtcagtaccttttcctgttgagaaggcgcctaccaagaagatcccccttgccaagtgtgcgctgaatagtggagtgaaggtgtcaaaactgacaaatttccccgtgagaggtctggtgtttgagagagggaacacactgaaggatttggctgatgtggttaccaacgcttgcatttggctccaggagaacaatgttcctttcaacgtcctcatctctgattccggtagaaggatcttcgtttttcctcagtgctatgccgagaagcaggctctcggtgaagtgagccaggatctgctagacacgcaggtgaaccctgcagtatgggagatcagtggccacattgttctgaaacggaggacggacttcgaggaggcttcagaagcatcagcctggaggcttctcgctgaggtgtctctgtcggaggagcgatttgaggaggtgaaggcatgtatctttgaggccaccggcctcactgaatctgacgaggaagaggaatccagtgagtctccttatgcatcgtcatcctccgtcccacgagcctcttcacacatgtcggaaggttgccttgtccttcagtgagagagtaaaggaaatctttcagatcgctaggttcgacccagctttcttgtacaaagtggtgatatcacaagcccgggcggtcttctagggataacagggtaattatatccctctagatcacaagcccgggcggtcttctacgatgattgagtaataatgtgtcacgcatcaccatgggtggcagtgtcagtgtgagcaatgacctgaatgaacaattgaaatgaaaagaaaaaaagtactccatctgttccaaattaaaattcattttaaccttttaataggtttatacaataattgatatatgttttctgtatatgtctaatttgttatcatcc

SEQ ID NO: 183 - DNA, 56 bp, Artificial sequence
  primer: prm15125
ggggacaagtttgtacaaaaaagcaggcttaaacaatgttgaaaatcaaaagagtt

SEQ ID NO: 184 - DNA, 50 bp, Artificial sequence
  prier: prm15125
ggggaccactttgtacaagaaagctgggtatacatacaaaccaccaagtc

SEQ ID NO: 185 - DNA, 56 bp, Artificial sequence
  primer: prm15127
ggggacaagtttgtacaaaaaagcaggcttaaacaatggagatgaagctgacgatt

SEQ ID NO: 186 - DNA, 50 bp, Artificial sequence
  primer: prm15128
ggggaccactttgtacaagaaagctgggtcgaacctagcgatctgaaaga

SEQ ID NO: 187 - DNA, 597 bp, Populus sp.
atgaagaactgtcatgagcctaaggctcagaaggtgaatattttatcgtcgtcgtcgtcttcattgccatcattgaactcctcagattctgaagatctggagcgcatgccattggcaccacttatattgaaaaacaagaaacgattgtccaagcaactctcaatgtgcgagactcgacgtgacagagcgtgggagagacgccgccgccaaatactaatgcaagagaggagaaggagcgggctgctagaatctgatgacttgacagatgaagacttgcatgagctcaaagggtgtatagagcttggatttggatttaaagaggaagagggacatcaattgaccaatacattgccagcattggatctctattttgcagttaaccggcaactctcgccaagtccggtgtccacgccgcaaagtggcgacttatcttcttcatcatcttcagcaatgggcacgcgttcatcttcatttgggagccccatgagtgatccagactggaaaatatgcagcccaggtgatgatccaaagcaggttaagaccaagttaaggcactgggcacaagctgtagcttgttcagtcatgcagtcttattga

SEQ ID NO: 188 - protein, 198 aa, Populus sp.
MKNCHEPKAQKVNILSSSSSSLPSLNSSDSEDLERMPLAPLILKNKKRLSKQLSMCETRRDRAWERRRRQILMQERRRSGLLESDDLTDEDLHELKGCIELGFGFKEEEGHQLTNTLPALDLYFAVNRQLSPSPVSTPQSGDLSSSSSSAMGTRSSSFGSPMSDPDWKICSPGDDPKQVKTKLRHWAQAVACSVMQSY

SEQ ID NO: 189 - DNA, 570 bp, Arabidopsis thaliana
atgggttgtgttcgctgcaaatcatcagatccatggcaaacatctgccaatgcctttgaatccgtcgatgaatccggaatcaacgaagcctgggttgagatctccagccgcagatcatttgtcgccggcgaaggtagtcggaagaagctagagaggaagaagagccaagtgttactggaaggttacgttgagactgcttcttcttcctcggtggatgatcaaaaggacgatctgacgagatccaagagtttgacggatgacgacctcgaagatcttagaggttgtttagatctagggtttggttttagctacgacgagatccctgagctctgcaacactttacctgctttggagctttgctattcaatgagccagaagttcttagacgataagcaaaataaatcaccggaaacttcgtcggtggaagattgtccgtcgcctccactggtcaccgccactccgattgccaattggaagatctctagtcccggtgataatccggatgatgtgaaagctaggctcaaatactgggcacaagccgttgcctgtactgtccaattgtgcagctga

SEQ ID NO: 190 - protein, 189 aa, Arabidopsis thaliana
MGCVRCKSSDPWQTSANAFESVDESGINEAWVEISSRRSFVAGEGSRKKLERKKSQVLLEGYVETASSSSVDDQKDDLTRSKSLTDDDLEDLRGCLDLGFGFSYDEIPELCNTLPALELCYSMSQKFLDDKQNKSPETSSVEDCPSPPLVTATPIANWKISSPGDNPDDVKARLKYWAQAVACTVQLCS

SEQ ID NO: 191 - DNA, 573 bp, Arabidopsis thaliana
atggtgagggttggagaagcattgagtgtatcaacctcatcgtcgtcatctttctacgacagcgaagtagaagagcttcaaaagatgccattggaaccaccgaaagctaaggctaagaaacgtctctcgaagcaactctccatgttagagacccgtagagacatcgcatgggagcgtcgccgtcgccagatgctccatcaccttgagaagcataacgaaggaggagatgacttgacggacgaggacttgagtgagctcaaaggatctattgagttagggttcgggtttaacgaggagcaagggcaacatcttacaactacattgcctgcattggacctttacttcgctgtgactcgtcagatctcgccggtttctacaccaggcagtggtggatcttcttcatcctcccgtcctacttccctcggagaccgatcttcctcttttggtagtccaataagcgactctgattctttgaaggttatgtctccaggagatgatcctcaacaggttaaaacgagactgaggcattgggcacaagctgtggcatgttctgtgatacaatcttccaattaa

SEQ ID NO: 192 - protein, 190 aa, Arabidopsis thaliana
MVRVGEALSVSTSSSSSFYDSEVEELQKMPLEPPKAKAKKRLSKQLSMLETRRDIAWERRRRQMLHHLEKHNEGGDDLTDEDLSELKGSIELGFGFNEEQGQHLTTTLPALDLYFAVTRQISPVSTPGSGGSSSSSRPTSLGDRSSSFGSPISDSDSLKVMSPGDDPQQVKTRLRHWAQAVACSVIQSSN

SEQ ID NO: 193 - DNA, 468 bp, Arabidopsis thaliana
atgtcgaaccacgcgccacagcctccaagacctctgatgaagcaatactcgtggtcaccggacatgagtcgcgaagaggcttggctgcgtaagaaaaagaaacgcccactggatctccttcctcgcagcaagagtgtcacgaatgatgatatcgaggagcttaaaggctgtttcgagcttggttttgggtttgaaacagaatctcctgatttgaatccaaggctctcccatacaatccccgctcttgatctgtactgcgcggttcatagacaatacagcaaccatttgtctcggacgtcttcattcgcgtcggatcatgaagtcagcaactccaacaacatcacgaccatcgtcgacaaaggtgatgatcggaagacgatgaagcagaagctgaaacaatgggctaaggtggtagggttttcggtgcggcactcttccggaaaacccaaattgatgtcagaagaatga

SEQ ID NO: 194 - protein, 155 aa, Arabidopsis thaliana
MSNHAPQPPRPLMKQYSWSPDMSREEAWLRKKKKRPLDLLPRSKSVTNDDIEELKGCFELGFGFETESPDLNPRLSHTIPALDLYCAVHRQYSNHLSRTSSFASDHEVSNSNNITTIVDKGDDRKTMKQKLKQWAKVVGFSVRHSSGKPKLMSEE

SEQ ID NO: 195 - DNA, 558 bp, Arabidopsis thaliana
atgtcgaaccaaaacaagccacagccgccaaaacctctgatgaagcaacagtctttgccaccagacataaaccgcgaagaggcttggctgcgaatgaagaaaaagcatccatcggcccgtcttcatcgcagcaagagctgcgtcacaaacgacgatatcgaggagctcagaggctgcttcgacctagggtttgggtttgagccagattctcttgactttaatccaagtctctccaaaacaatcccagctttggatttgtacagcgccattcacagacagtacagcaaccatttgtctcggacatggtcgtctacgtcggaacgtgacgtcaactctagcaccacgactatcgtcaacaaagttatgtccgaagaatggcatttttgtaatataattgttaaaaggctatttcaattaatgtttctgtatttgactgttagtcaagtgagaaggaggcatggggaagcaccatactcagcagtccgactaattgacgggattgacaagcagatcagaaatcggttcgcgacaatacgagtcaccggggaccaatgttaa

SEQ ID NO: 196 - protein, 185 aa, Arabidopsis thaliana
MSNQNKPQPPKPLMKQQSLPPDINREEAWLRMKKKHPSARLHRSKSCVTNDDIEELRGCFDLGFGFEPDSLDFNPSLSKTIPALDLYSAIHRQYSNHLSRTWSSTSERDVNSSTTTIVNKVMSEEWHFCNIIVKRLFQLMFLYLTVSQVRRRHGEAPYSAVRLIDGIDKQIRNRFATIRVTGDQC

SEQ ID NO: 197 - DNA, 609 bp, Arabidopsis thaliana
atggcttgtattcacatcgaatcatcacatccacctgcatggaagacacactctgtccaagagaacaaaccagcaaatgctgatgatatatcgaacacaaccttaccagaacaccacgacggtggcgacgggggaatccaagaaacgtgggccgcgattggagattctggcggcagaggaggaggctatttcgccggagagagtaggaagaagctggagaagaagaagagccaagtgttgcttgagggatacgcgttggatgatcaagatgatttgacgagagccaagagtttgacggatgatgatcttgaggagcttaaaggttgtttagatctagggtttggttttagttacgatgagatccctgagctttgcaacactttgcctgcgttagagctttgttactccatgagccagaagttcttagatgataagcaacaaaaccaccacaagtcccaggaggaagatgattcgtcgccaccaccgaccacgaccgctccaattgcaaattggaagatctctagccctggtgatgatccagatgatgtaaaagctagactcaaatattgggcacaaactgttgcttgcaccgtacggttgtgcagctga

SEQ ID NO: 198 - protein, 202 aa, Arabidopsis thaliana
MACIHIESSHPPAWKTHSVQENKPANADDISNTTLPEHHDGGDGGIQETWAAIGDSGGRGGGYFAGESRKKLEKKKSQVLLEGYALDDQDDLTRAKSLTDDDLEELKGCLDLGFGFSYDEIPELCNTLPALELCYSMSQKFLDDKQQNHHKSQEEDDSSPPPTTTAPIANWKISSPGDDPDDVKARLKYWAQTVACTVRLCS

SEQ ID NO: 199 - DNA, 570 bp, Arabidopsis thaliana
atgtgcgattcagattttctctctcgttgctcttcctacgaagcagacgttgattccgacagcgagatctcgacctccagtttcagttcttgttcgtacagtgaatctgaggaagaagagatcaacaatggttttggtgttgttcagtcgaagaagcaaacgaagaaactggagaagaagaagagtaatgtgttgttagaaggttacgttgtagattcagctgtgaatgatgatttgaagagaaccaagagtttaacggacgatgatctcgaggagcttaagggatgtgtagatctagggtttgggtttaattacgaggagattcctgaactttgtaatactttaccagctcttgagctctgttactcgatgagtcagaagtttattgatcaagatcatcatcaccattcttcttcttcgccagagaagaaatcatcggttcttgattctcctgttagtcctattgctagctggaagatctctagtcctggtgataatcctgatgatgttaaagcaaggttgaaattttgggcacaagctgtggcatgtactgtgaggttatgtacttga

SEQ ID NO: 200 - protein, 189 aa, Arabidopsis thaliana
MCDSDFLSRCSSYEADVDSDSEISTSSFSSCSYSESEEEEINNGFGVVQSKKQTKKLEKKKSNVLLEGYVVDSAVNDDLKRTKSLTDDDLEELKGCVDLGFGFNYEEIPELCNTLPALELCYSMSQKFIDQDHHHHSSSSPEKKSSVLDSPVSPIASWKISSPGDNPDDVKARLKFWAQAVACTVRLCT

SEQ ID NO: 201 - DNA, 576 bp, Arabidopsis thaliana
atggtgagaagaagagaaggtcttacattgccaatcataaaaccggcgcttcccgaggtcagatcagcagcgacaacgccggtggcctcacagaaaccaaaacatcgtttatcgaaacaactatctatgtgtgaaacaccaagagacgttgcttgggaaagaagaaggcgtcagatgataatgattcaagaaaagaagctgcttcataagggcgcttcagacaatctttgtatacaggcgaatctaacggatgaagatttaaacgagctaaaaggatcgattgagctaggtttcggtttcaatgaagaagcaggacaaaagctttgtaatacattaccagctcttgatctttactttgcagtgaatcgtcagctctcgcctcttccttcacctagcagcagccgtagcagcagtgcatctgcgtcaactttctcatacagtataccttgtagtccaaagaaaactgattcagattctgttaaaatcttatgcccaggggacgatcctcaacaaatgaagcagaggttgagacattgggcacaagcagttgcatgttctgttatgcagtcttattga

SEQ ID NO: 202 - protein, 191 aa, Arabidopsis thaliana
MVRRREGLTLPIIKPALPEVRSAATTPVASQKPKHRLSKQLSMCETPRDVAWERRRRQMIMIQEKKLLHKGASDNLCIQANLTDEDLNELKGSIELGFGFNEEAGQKLCNTLPALDLYFAVNRQLSPLPSPSSSRSSSASASTFSYSIPCSPKKTDSDSVKILCPGDDPQQMKQRLRHWAQAVACSVMQSY

SEQ ID NO: 203 - DNA, 546 bp, Arabidopsis thaliana
atgaaccaatcaaaaacaaatccagccattgatcgtaaaacctttccaccaccgcacaccccctcgccgggggtagtgcgtcgcatacacgcgccaccgttaccttctacttctctcttgaagcaacactcgtggtctcctgatctaatccgcgaggaagcttggtcaaaacgtcaagatatctcccgccaccgtcatctccgccgtggtaagagcttgaccgacgaagatctcgacgagcttaaagcaagtttcgaactcggattcggtttcggatctcccgaaaacgctgatccaagactttccaacacgcttcccgcgttagaactttacttcgccgttcaaaaaagctacaacgacgccgtttctaacaaatcaacaacgtcgtcgtcttcactctccgacggcgataccagtcctcaccacaccgtataccaaaccaacgaagctgaagcaatgggcgagagtggtggcgtgcaccgtgaaccaatcgccgccgagatgataattttaacgactgttaaacgttgtggggataaaggttaa

SEQ ID NO: 204 - protein, 181 aa, Arabidopsis thaliana
MNQSKTNPAIDRKTFPPPHTPSPGVVRRIHAPPLPSTSLLKQHSWSPDLIREEAWSKRQDISRHRHLRRGKSLTDEDLDELKASFELGFGFGSPENADPRLSNTLPALELYFAVQKSYNDAVSNKSTTSSSSLSDGDTSPHHTVYQTNEAEAMGESGGVHREPIAAEMIILTTVKRCGDKG

SEQ ID NO: 205 - DNA, 465 bp, Arabidopsis thaliana
atgtcaaaacgcaacgcgccgtttcaagcaccgcctagaccgctagtaaaacaacattcatggtcaccggacgcggatcgagaagaagcttggcttcgaaagaaggggaagcaatcattgggccgactcggtcggagtaagagcgtgacggacgaagatctagaagagctcaagggatgcatcgagcttggatttggattcgagccggattcgcctgatttagatccgaggctctcggaaactcttccagctcttggtttatactgcgccgtcaataaacagtatagtagcagattgtcacggacttcgtctctttcgtcgatcgcatcggaaggtgaaaacagcaattccagcacgacgatcgttgatcaaggtgatgatccggagacgatgaagctgaggttgaagcaatgggctcaggtggttgcttgttcggtgaagcaattctccggcgaaccgaattga

SEQ ID NO: 206 - protein, 154 aa, Arabidopsis thaliana
MSKRNAPFQAPPRPLVKQHSWSPDADREEAWLRKKGKQSLGRLGRSKSVTDEDLEELKGCIELGFGFEPDSPDLDPRLSETLPALGLYCAVNKQYSSRLSRTSSLSSIASEGENSNSSTTIVDQGDDPETMKLRLKQWAQVVACSVKQFSGEPN

SEQ ID NO: 207 - DNA, 579 bp, Arabidopsis thaliana
atggtgaggagaagagaaggtcttaccttaccaatctcgtcttcgacgccatctcttcccgagtcactacctgatattaaaacagtggctcctcataaaccaaaacaacggttatctaagcagttatcaatgcgtgagacacctcgagatgttgcttgggaaaaaaggcgccgtcagatgttaaagattcaggagaagaaacaaaaaagcgtctctgaaaacgataacgattcgccggatctaactgatgaagatttaagggagcttaaagggtcgatcgagttagggtttggtttcagtgaagaagccggacagaagttgtgcaacacgttaccagcattggacctttactttgctgtgaataggcagctttcgcctctcccttcacctagtagcagcaatggaggagatggatccttgtcttctacttctgtttcctcaagcagcataccttgtagtccaaaaaccgactcggattcattaaagatcttatgtccaggggacaatcctcaacaagtgaagcaaagattacgacattgggcacaagccgttgcatgttctttgatgcaatctcactga

SEQ ID NO: 208 - protein, 192 aa, Arabidopsis thaliana
MVRRREGLTLPISSSTPSLPESLPDIKTVAPHKPKQRLSKQLSMRETPRDVAWEKRRRQMLKIQEKKQKSVSENDNDSPDLTDEDLRELKGSIELGFGFSEEAGQKLCNTLPALDLYFAVNRQLSPLPSPSSSNGGDGSLSSTSVSSSSIPCSPKTDSDSLKILCPGDNPQQVKQRLRHWAQAVACSLMQSH

SEQ ID NO: 209 - DNA, 501 bp, Carica papaya
atgtccctccccttctaccaccacttgcccccgccgccacctcctccgccgcagccgcatccgctcgtgccagaaccgcctgtgaatccgtcgccgctctacaagcagcgatcatggtcgccggatatctatcgagacgaggcgtggttgaagcgtaaaggaaaaagtaagaaccgaaggagcaagagcgtcaccgaagaggatctcgacgagcttaaggcctgcatcgaactaggctttggctttgactcccccgttgccgatcagcgattatccgataccttaccggctctcggtctttactacgcagtgaataagcagtacaacgacaccgtttcgaagtccacaacttcgtcaatatccgactgcgaatctccctctcccacgggcagccctcacactatattccacccaagtgataatccacagacggtgaagacaaggttgagacaatgggcgcaggtggttgcgtgctcggtacggcaatcctccagcggatag

SEQ ID NO: 210 - protein, 166 aa, Carica papaya
MSLPFYHHLPPPPPPPPQPHPLVPEPPVNPSPLYKQRSWSPDIYRDEAWLKRKGKSKNRRSKSVTEEDLDELKACIELGFGFDSPVADQRLSDTLPALGLYYAVNKQYNDTVSKSTTSSISDCESPSPTGSPHTIFHPSDNPQTVKTRLRQWAQVVACSVRQSSSG

SEQ ID NO: 211 - DNA, 558 bp, Carica papaya
atgtcggagttcaaagacttcgacatgccgtcaaatccgccgccgccgcctcctataccttcgcggccgcttcacaagcaccgttcctggtctatgtcgaagttaaattttcaaccgccgccgccgccgccgtgtcctctgttaaagcaccgatcgtggtctccggacgcggatcgggacgaggcctggatcaggaaacggcaggcaaaccatcaaatcggcctcgaaaggagcaagagcgtcacggacgatgatttggaggagctcaagggttgtatcgagttaggattcgggtttgaacccgactcacccgatttggaaccgaagttgtctgatactctgccggctctggagttttactgcgccgttaacaggcagtacagtgaacggctttccagaacgtcgtcgttttcgtcaattgcgtcggacagcgagggtagcagcactagtactatatttgatccagctgatggtccggagacggtgaagatgaggttgaaacagtgggcgagggtggttgcttgttctgttcggcagttttcaggagaacccaattga

SEQ ID NO: 212 - protein, 185 aa, Carica papaya
MSEFKDFDMPSNPPPPPPIPSRPLHKHRSWSMSKLNFQPPPPPPCPLLKHRSWSPDADRDEAWIRKRQANHQIGLERSKSVTDDDLEELKGCIELGFGFEPDSPDLEPKLSDTLPALEFYCAVNRQYSERLSRTSSFSSIASDSEGSSTSTIFDPADGPETVKMRLKQWARVVACSVRQFSGEPN

SEQ ID NO: 213 - DNA, 522 bp, Carica papaya
atgggagggttgtcttgtgagtcagattcatgggtttgctcttccgaaactcaaacctcggagtactccaatgaatttcatgaagaaattgagcaagaatgggaaagaattaacaatggcgagaagctgttgagtaagaaaaagaagaagaagaagaagcaggttttgttagaagcgtatgtggagaatgttgatgaggatgatttgaagaggacgaagagcttgaccgatgatgatcttgatgagctgaaaggatgtttggatctaggttttggcttcagctatgacgagatacctgagctctgcaacaccttgcctgcgcttgagctctgttactcaatgtcccagaagttcctcgatgatcatcagaagaccccggaaaattctccgctcgctgattccgtctccagtcctattgccaattggaagatctctagccctggtgaccatccagaagatgttaaagcaagactcaaattttgggcacaggctgtggcatgcaccgtgaaattatgcagctaa

SEQ ID NO: 214 - protein, 173 aa, Carica papaya
MGGLSCESDSWVCSSETQTSEYSNEFHEEIEQEWERINNGEKLLSKKKKKKKKQVLLEAYVENVDEDDLKRTKSLTDDDLDELKGCLDLGFGFSYDEIPELCNTLPALELCYSMSQKFLDDHQKTPENSPLADSVSSPIANWKISSPGDHPEDVKARLKFWAQAVACTVKLCS

SEQ ID NO: 215 - DNA, 585 bp, Carica papaya
atggggaaacaagggcaggaacgacaagtgggtttgcagagttcggcgtcttctccgtcggtttacagcgagggtagtggtgatcacgatgaggagttgcagcagatgccattggttccgccgaggttgaagatgaataaaaaaaggttgtcgaaacagctgtccatgtgcgagacgccgagggatattgcttgggagagaagacgacagcagattcttcgacaggaaaggaggagaagtattaatggatcgaatagtaataatagtgagtcagacgatttgacggatgaagatctgcatgaactcaagggttgtatagagcttggttttgggtttaaggaagaagaaggtcaacagctctgcaacacattgccggcgcttgacctttattttgcggtcaaccgtcaattttctccgagtccggtgtcaacaccgggaagccgatcatcttcgttggggagtcccaggatgagtgattcagattcttggaaaattttaagcccaggagacaatccacaacaggtgaagacgaaattgaggcattgggctcaagctgttgcgtgttctgtaatgcagtcttattga

SEQ ID NO: 216 - protein, 194 aa, Carica papaya
MGKQGQERQVGLQSSASSPSVYSEGSGDHDEELQQMPLVPPRLKMNKKRLSKQLSMCETPRDIAWERRRQQILRQERRRSINGSNSNNSESDDLTDEDLHELKGCIELGFGFKEEEGQQLCNTLPALDLYFAVNRQFSPSPVSTPGSRSSSLGSPRMSDSDSWKILSPGDNPQQVKTKLRHWAQAVACSVMQSY

SEQ ID NO: 217 - DNA, 336 bp, Oryza sativa
atgaaaggatctgtactagtgttggtggccgtgaacgaggcagccgcgaccagcagagaaggctttgggcggtgcctgaccgacgcagacctcgacgagctgaggggctccttcgagctcgggttcggtttcgacaaggagaaaggaggcgccggcctctgcgacaccctcccggccctcgacctctacttcaccgtcaaccggcagcgcctctccgacggctccaagctgcggagccccacgtcgacgctgtcgtcgtccacgctgatctccggcgcgtcatcgagccctcagttttccccacgccgacgcatggacgatcttctctccaggtga

SEQ ID NO: 218 - protein, 111 aa, Oryza sativa
MKGSVLVLVAVNEAAATSREGFGRCLTDADLDELRGSFELGFGFDKEKGGAGLCDTLPALDLYFTVNRQRLSDGSKLRSPTSTLSSSTLISGASSSPQFSPRRRMDDLLSR

SEQ ID NO: 219 - DNA, 558 bp, Oryza sativa
atggagaaggttagccatctgatgaacggcggctgcggcggcgtggggaagaggaggggccttccggcggcgggggtggggctagggctgcagaagcagaactcgtggtcgccggacatggagagggacgaggcgtgggagcggcggcgcgggatgaacaagggatcgtcgtcgtcgtcggcgctgcggcgggtgaggagcgtcacggacgacgacctcgacgagctgcgcgggtgcatggatctcgggttcgggttcgaggcggccgggtgcccgctgtgcggcgccgggaggagccgcctggtggagacgctccccgcgctggacctctactacgccgttcacggcaacgccggcggcggcggcggcggcgcgggcgaggtttgcgccgccgcgagcccctgctcgtgcggcgcctcctcgtcggatgtgtccgaggagtcgccgctcgggagccccatgtccatactctctccaggagacacgccggagacggtgaagatgaggctgaagcagtgggcgcaggtggtggcgttgtccgtgcgcaaccgttgctga

SEQ ID NO: 220 - protein, 185 aa, Oryza sativa
MEKVSHLMNGGCGGVGKRRGLPAAGVGLGLQKQNSWSPDMERDEAWERRRGMNKGSSSSSALRRVRSVTDDDLDELRGCMDLGFGFEAAGCPLCGAGRSRLVETLPALDLYYAVHGNAGGGGGGAGEVCAAASPCSCGASSSDVSEESPLGSPMSILSPGDTPETVKMRLKQWAQVVALSVRNRC

SEQ ID NO: 221 - DNA, 714 bp, Oryza sativa
atggcaagcagcggcaaggagcaccggcgaggtgttccacgcccaccgccgttgtcgctctacatcgagagggagcaaggtgaggtcatcatggctggtcaggcgctggcgacgacgaggatgctccagcaggtcgccaccagcagcagtggcaagaagaggatactgtccaagcagctgtccatgaaggagacaacccgggaggtcaagtgggagaagcggcgcaggcagatacaccggcagaggagcagcatggcccttcaggatgttgaggaagaagcgagtgccaacatgttcgccgccaccactgacagcgaaatgggctccagcaccgagcgggtgcccaagaggctgaccgatggagacctcgatgagctgaggggatccatggagcttggctttggattcgacgaggagaatggtgggcagaacctctgtgacacgctccctgccctcgacctctacttcgccgtcaaccggcagctctcggagcccaagatgcgtttgtccactagctccttgccatcaccgacatcagcgacgtcgtcctcctctaccctcggtggcacatcgaacccgggtagccccgtcgcaccttcttctttcatggactcgtggaagatttgcagtccaggtgacaaccctcagcttgtgaagacaaggcttaggcactgggctcaagtagtggcctgttcagtgaaacactccagctga

SEQ ID NO: 222 - protein, 237 aa, Oryza sativa
MASSGKEHRRGVPRPPPLSLYIEREQGEVIMAGQALATTRMLQQVATSSSGKKRILSKQLSMKETTREVKWEKRRRQIHRQRSSMALQDVEEEASANMFAATTDSEMGSSTERVPKRLTDGDLDELRGSMELGFGFDEENGGQNLCDTLPALDLYFAVNRQLSEPKMRLSTSSLPSPTSATSSSSTLGGTSNPGSPVAPSSFMDSWKICSPGDNPQLVKTRLRHWAQVVACSVKHSS

SEQ ID NO: 223 - DNA, 699 bp, Oryza sativa
atgacgtggagctccgactccgaccgcgacgacgagccggccaccgccgccgccgcgtcggccgacgacgcctccctggcgacttctttctttctgcagcagccggggacgcctcccgccgccgcgccagcgccagcgcgcaggcggaggcacaagaaccggcggccgcgcgcgcaccggcgagccgccgccaagaacgaggaggaggaggaggttgcgggcaccgaggacgtgtggcgcggggcgcagtgggaggcggcgtggccgcggcgggcggcggcgaggccggtggtggtggccgacgacgccgcgggcgccgccgccgcgagggaggacgcgcccggcgttggcggggagggcggcggcctcggcgtggggcgggcgaggagcctgaccgacgacgacctggaggagctcaaggggtgcgtggatctggggttcgggttcagctacgacgagatccccgagctctgcggcacgctcccggccctcgagctctgctactccatgagccagcgcttcctcgacgaacactaccactcgccggtggcggagccggctccggtggccccctcctccccggcgcagcccatcgccaactggaagatctccagccctggggatagcccagatgaggtgaaggcgaggctcaagtattgggcgcaggcggtcgcgtgcaccgtcaggctttgcagctaa

SEQ ID NO: 224 - protein, 232 aa, Oryza sativa
MTWSSDSDRDDEPATAAAASADDASLATSFFLQQPGTPPAAAPAPARRRRHKNRRPRAHRRAAAKNEEEEEVAGTEDVWRGAQWEAAWPRRAAARPVVVADDAAGAAAAREDAPGVGGEGGGLGVGRARSLTDDDLEELKGCVDLGFGFSYDEIPELCGTLPALELCYSMSQRFLDEHYHSPVAEPAPVAPSSPAQPIANWKISSPGDSPDEVKARLKYWAQAVACTVRLCS

SEQ ID NO: 225 - DNA, 648 bp, Oryza sativa
atgtggagctcggattccgaggcagacctcaccgccgccgcggccgccatgaccaccaccaccacaacctcctcctcctcctcctcatcctcctctccttcctcctcccctcccccgcctcgccgtcgccatcgccaccaccgccgcgccgcccgcaggacccacccggtggaggcggaggccgaggaggtgtggcgcggggcacagtgggaggcggcgtggccgcggcggacgaagccggtggtggtcgccgaggacgagccgccgagcggcggcgtcatcgtcggcgcgtgcacggcggggggcggcgaagagggcggcggcgtggggcgcgcgcggagcctgaccgacgacgacctggaggagctcaaggggtgcgtggatctcgggttcgggttcagctacgacgagatccccgagctctgcggcacgcttccggctctcgagctctgctactccatgagccagcgcttcctcgacgaccacccccagtcgcaccactcgccgccgcctccgccgccgccgatgccctcgccgtcgattcccaactggaagatctccagccccggagacagcccggacgaggtgaaggctcggctcaagtactgggcgcaggccgtcgcgtgcaccgtcaggctctgcagctga

SEQ ID NO: 226 - protein, 215 aa, Oryza sativa
MWSSDSEADLTAAAAAMTTTTTTSSSSSSSSSPSSSPPPPRRRHRHHRRAARRTHPVEAEAEEVWRGAQWEAAWPRRTKPVVVAEDEPPSGGVIVGACTAGGGEEGGGVGRARSLTDDDLEELKGCVDLGFGFSYDEIPELCGTLPALELCYSMSQRFLDDHPQSHHSPPPPPPPMPSPSIPNWKISSPGDSPDEVKARLKYWAQAVACTVRLCS

SEQ ID NO: 227 - DNA, 534 bp, Populus sp
atgtccctcccctacccccgcccgccgccaccacctcgagaagaacaaatagaatatcaaccacccatacgaaaacagcatcaacaacaactactagggccgtctccactttacaaacaacattcatggtcacctgatatttacagggacgaggcgtggctaaggaggaaaggaaactataagaaaaagaaatgcaaaagcgttactgatgaagatctcgatgagcttaaaggttgtattgagttaggttttgggtttgactctccagaaatggatcaacgtttgtctgatacttttcctgctttggaactttattatgctgtcaacaagaactaccatgaccattccgtctccaagcctttcactgatacgtcgtcttcgtccatggcgtctgattgtgattcactctctcccctaggtagccctcacaacatttttggtccaggtgacaatccacagacggtgaagacaaggctaaagcagtgggcacaggtggttgcttgttcggtgaggcagagttcaagttcaagctga

SEQ ID NO: 228 - protein, 177 aa, Populus sp
MSLPYPRPPPPPREEQIEYQPPIRKQHQQQLLGPSPLYKQHSWSPDIYRDEAWLRRKGNYKKKKCKSVTDEDLDELKGCIELGFGFDSPEMDQRLSDTFPALELYYAVNKNYHDHSVSKPFTDTSSSSMASDCDSLSPLGSPHNIFGPGDNPQTVKTRLKQWAQVVACSVRQSSSSS

SEQ ID NO: 229 - DNA, 597 bp, Populus sp
atgggagccatctcttgtgaacgagaatcttgggtttcttcaagtaacctagtagaagttaaagaaaatcaagaaaatgatcaaacccacaacgtagattttcttgctgatgatgttttagagactgaacaagtgtggcaatacatgcaccaaaataacacctttaccaaaagcatcaacaagggttctcttcaaaagatccagagaaagaagagtcaagtgttgttagaagggtatgtggaaggaagtagtagcggtagtgaagatgagttgaagaggacaaagagcttgacagatgatgatcttgatgagttaaaagggtgcttggatcttgggtttggtttcagttatgatgagatccctgaactttgcaatactttgccagctcttgagctttgttactcaatgagtcagaaatttcttgatgagcatcagaagtctcctgagggaagttcccctgccgtggctgaggctgcaaattctagtcctattgctaattggaagatctctagtcctggtgaccaccctgaagatgttaaagcaagactcaaatattgggcacaggctgtggcatgtactgttaggctatgcagctga

SEQ ID NO: 230 - protein, 198 aa, Populus sp
MGAISCERESWVSSSNLVEVKENQENDQTHNVDFLADDVLETEQVWQYMHQNNTFTKSINKGSLQKIQRKKSQVLLEGYVEGSSSGSEDELKRTKSLTDDDLDELKGCLDLGFGFSYDEIPELCNTLPALELCYSMSQKFLDEHQKSPEGSSPAVAEAANSSPIANWKISSPGDHPEDVKARLKYWAQAVACTVRLCS

SEQ ID NO: 231 - DNA, 552 bp, Populus sp
atgtccctccccaacccccacccgcctcgaccaccaccaccatcgcctccagaagaacaaatagaatatcgaccacccatacgaaaacaacaacaaaatcaccgactactaggaccgtctccactttacaaacaacattcatggtcaccagatattgacagggatgaggcatggctaaggaggaaaggaagctataagaaaaagaaaagcaaaagcgttactgatgaagatcttgatgagcttaaaggttgtattgagttaggttttgggtttgactctccagaaatggatcaacgtttgtctgatacttttcctgctttggaactttattatgctgttaacaaaaactactatgatcattccgcctccaagcctgtagtcactgctacgccgtcttcgtccacggcgtctgattgtgactcaccgtctcccctaggtagccctcacaccatttttggtccaggtgaaaatccacagacggtgaagacgagattaaggcagtgggcacaggtggttgcctgttccgtgcggcaaagttcaagttcaagctga

SEQ ID NO: 232 - protein, 183 aa, Populus sp
MSLPNPHPPRPPPPSPPEEQIEYRPPIRKQQQNHRLLGPSPLYKQHSWSPDIDRDEAWLRRKGSYKKKKSKSVTDEDLDELKGCIELGFGFDSPEMDQRLSDTFPALELYYAVNKNYYDHSASKPVVTATPSSSTASDCDSPSPLGSPHTIFGPGENPQTVKTRLRQWAQVVACSVRQSSSSS

SEQ ID NO: 233 - DNA, 411 bp, Populus sp
atgctcaacaagcagctatcgtggtctccagacatgacccgcgaggaagtatggctcagaaggaaaggaaattctgcaacccgacgccggtgcagcaagagtgtgactgacgatgatttagaggagttaaaagcatgtattgaattaggattcgggttcggacccgactcgtctgatttggatccgaagttgtcggataccttgcccgctttaggtttttactgtgctcttaataaacagtatagtagttgtttgtctagatcagcttcgacgtcgtcgcttttgtctgtttcaggtgaaaagtggtgtttttcggcaggtgatgatccggagatggtgaagaagaggttgcgacaatgggcccagattgtcgcatgctcggtcaagcaattttcaggggaaccaaattga

SEQ ID NO: 234 - protein, 136 aa, Populus sp
MLNKQLSWSPDMTREEVWLRRKGNSATRRRCSKSVTDDDLEELKACIELGFGFGPDSSDLDPKLSDTLPALGFYCALNKQYSSCLSRSASTSSLLSVSGEKWCFSAGDDPEMVKKRLRQWAQIVACSVKQFSGEPN

SEQ ID NO: 235 - DNA, 486 bp, Populus sp
atgccattggcgcccctgatatggaagaacaagaaacgcctgtccaagcaactttcaatgtgcgaaactcaacgtgacagagcatgggagagacgtcgccgccaaatactaatgcaggaggggagaaaaaacaagctcctagattctgatgacttgacagatgaagacttgaatgagctcaaagggtgcatagagcttggatttggatttaaagaggaagaggggcaacaattggccaatacgttaccagcactggatctttattttgccgttaaccggcaactatcgccaagcccggtgtccacacctcatagtggagaatcaccatcttcatcagcaatgggcacacgttcatcttcatttggaagccctaagggcgatccagattggaagatatgtagcccaggtgatgatccaaagcaagttaagactaagttaaggcactgggcacaagctgtagcttgttcggtcaggcagtcttattga

SEQ ID NO: 236 - protein, 161 aa, Populus sp
MPLAPLIWKNKKRLSKQLSMCETQRDRAWERRRRQILMQEGRKNKLLDSDDLTDEDLNELKGCIELGFGFKEEEGQQLANTLPALDLYFAVNRQLSPSPVSTPHSGESPSSSAMGTRSSSFGSPKGDPDWKICSPGDDPKQVKTKLRHWAQAVACSVRQSY

SEQ ID NO: 237 - DNA, 489 bp, Sorghum bicolor
atggcggccgtctcctccacctccactgcctacttctcctcgcagccgcagctgccgacctccaccgccgaccctacttccgacgccgccagcagcaggctggtgcggcagccacggcggagcagcagcttcgtgatggtggaggcgtcctctgccagcggcagcgacggcggggtggccaggacgaagagcctcacggaggacgacctggaggacctcaagggctgcctcgacctcggcttcggcttcgcgtacagcgagatacccgagctctgcgtgacgctgcccgcgctcgagctctgctactccatgacccggaggttcctcgacgagcagagggcatcggggcaggagcaggaggaggagcctgcgtcgccaccgctccccaattggaggatctctggaccgggtgaccatccagaggaagtgaaggccaggttgaagtattgggctcaagcagtagcatgcactgtcaagctctgcaggtaa

SEQ ID NO: 238 - protein, 162 aa, Sorghum bicolor
MAAVSSTSTAYFSSQPQLPTSTADPTSDAASSRLVRQPRRSSSFVMVEASSASGSDGGVARTKSLTEDDLEDLKGCLDLGFGFAYSEIPELCVTLPALELCYSMTRRFLDEQRASGQEQEEEPASPPLPNWRISGPGDHPEEVKARLKYWAQAVACTVKLCR

SEQ ID NO: 239 - DNA, 789 bp, Sorghum bicolor
atggatcgattggacatgatggacaacatcaactgccgtcgggtgatgacgaacaagccacgcatcgaagctcaatcctcttcgtcggtcgacagagacagggagaaggaggaggacgaagcacaacaggacgaagtggccgaggcgatgaaggcacccctgctgggttggaatcacaatcaccacgaagcggctggcggcattggcaacaacaggaggcggcttctgtcaaagcagctgtcaatgaaggagactaccagggaggccaaatgggagaagcgccggcggcagatactgcggcgtagcagcatggtatcgctaaatgacggaggaagcggtagcagcaagagcatcatcgacgaacggcattattgtcatcatgttatgaggtcttcgtcggagtgcgtaatgaggcgcctgactgacgaggaccttgacgagctgcggggctccttcgagcttggatttggattcgacgaggacaccggcggaacacacctgcgtgacacgctgcccgccctcgaattctacttcgctgtgaaccggcagctgtcggaccgcaagctgcggacgctggcggcggcgagccccacgtcgactttatcggccgtgtcttcgtcgtccacgctccctgacatcccgagcccacgcagccccaacgccggtgcaaccgccaatggcggcgccgactcatggaagatttttaccccaggtgacaaccctcagcttgtgaagacgaggctgaggcactgggcgcaggtggtggcttgctccatcaagcacggctga

SEQ ID NO: 240 - protein, 262 aa, Sorghum bicolor
MDRLDMMDNINCRRVMTNKPRIEAQSSSSVDRDREKEEDEAQQDEVAEAMKAPLLGWNHNHHEAAGGIGNNRRRLLSKQLSMKETTREAKWEKRRRQILRRSSMVSLNDGGSGSSKSIIDERHYCHHVMRSSSECVMRRLTDEDLDELRGSFELGFGFDEDTGGTHLRDTLPALEFYFAVNRQLSDRKLRTLAAASPTSTLSAVSSSSTLPDIPSPRSPNAGATANGGADSWKIFTPGDNPQLVKTRLRHWAQVVACSIKHG

SEQ ID NO: 241 - DNA, 546 bp, Sorghum bicolor
atggataaggcggcggggcaacgccatcttatcggaggcggcggcggcggcggagggaagaaggcggggtctgccgcggcgcccgcgcttggactgcagaagcagaactcgtggtcgccggacatcgagcgcgatgaggcatgggagcgccggcgccggggcatgcgccgcggcggcacggcgctgcggcgcgtccggagtgtcacggacgacgatctcgacgagctccgcgggtgcatcgatctggggttcggatttgagccggcccctgccgtcgccgggtccgggtgcgcggcgtgcggctgtgccgggaggaaccgcctcctggagacgctgccggcgctcgacctctactacgccgtccacgccggcggtgccgagggaccgacgtgctcgtgcggcgccgcgtcggaggtctcctccgaagagtcgccgctcggcagcccgatgtccatattatctccaggcgatccaccggagacggtgaagatgcggctgaagcagtgggcgcaggtggttgcgctttccatgctgagccgccactga

SEQ ID NO: 242 - protein, 181 aa, Sorghum bicolor
MDKAAGQRHLIGGGGGGGGKKAGSAAAPALGLQKQNSWSPDIERDEAWERRRRGMRRGGTALRRVRSVTDDDLDELRGCIDLGFGFEPAPAVAGSGCAACGCAGRNRLLETLPALDLYYAVHAGGAEGPTCSCGAASEVSSEESPLGSPMSILSPGDPPETVKMRLKQWAQVVALSMLSRH

SEQ ID NO: 243 - DNA, 681 bp, Sorghum bicolor
atgtggagctcggactccgaccgcgacgagcagcccgtcgacacggcgaccaccaccaccacctcgtcgccggcgcagcagccgtcgacgccgcccgcgccgcctcggcgccggcgccagcgcgcgcgacgccgcgcccagcgcctccgtgccaagaacaccggcgcaggagaggaggaggaggaggccgaggcggaggacgtctggcgtgggctgcagcagcagcagcgggagcgggaacgggaggcgtggccgcggcgggcgtcgaggcccgtggtggttgccgccggcgaggaggggtccccggacgccgcttctgccacctcaggggagagcgtcggcgggatggggagggcgcggagcctgaccgacgacgacctggaggagctcaaggggtgcgtggatctgggcttcggcttcagctaccacgagatccccgagctctgcggcacgctgccggcgctcgagctctgctactccatgagccagcgcttcttggacgaacaccagcagctcagcaaggcggcggaggaggcgccggcgctggctccggcctcgccagcgcagcccgtcgccaccaactggaagatctccagccctggcgacagcccggacgaggtgaaggcgaggctcaagtactgggcgcaggcggtggcgtgcactgtcaggctctgcagctga

SEQ ID NO: 244 - protein, 226 aa, Sorghum bicolor
MWSSDSDRDEQPVDTATTTTTSSPAQQPSTPPAPPRRRRQRARRRAQRLRAKNTGAGEEEEEAEAEDVWRGLQQQQREREREAWPRRASRPVVVAAGEEGSPDAASATSGESVGGMGRARSLTDDDLEELKGCVDLGFGFSYHEIPELCGTLPALELCYSMSQRFLDEHQQLSKAAEEAPALAPASPAQPVATNWKISSPGDSPDEVKARLKYWAQAVACTVRLCS

SEQ ID NO: 245 - DNA, 720 bp, Sorghum bicolor
atgggcagtaatggcagagagcataggtgcggagtcccacgcccgccacctttatcactttacagggactgggaggaggaagaggtcgtcaaggtcggcagacgccagcagtcgccgctggaacagtcaacatcgatttcagccacagccggcattgccaacaagaagaggttgtcaaagcaggtgtccatgaaggagaccacccgggaggtcaagtgggagaagcggaggcgacagatacagcgacagaggagcagcatgcgcctcaacgaagctgacgacagggctggtagcaggactgtctgtcatgttgacagcgaggcgagctcgagcgcggagcgggtgtcgtccaagcgtataaccgacgaggacctcgatgagctgaggggatccatggatctcggcttcaggttcgacgagcacaagggcgggcaggacctgtgcgacacgctcccggccctcgacatctactttgctgtcaaccggcagctgtccgagcccaaaatgcggttttctacgagctcagcaccgtctctcttggccaccaagtcgtcgcccaacctctgcggcacgcccagccccggaagtcctagtacgcactctaataaccccttggagtcatggaaaatttgcagtccaggagataacccacagcttgtgaagacaaggcttaggcactgggctcaagtagtggcttgttcagtgaagcactccagctga

SEQ ID NO: 246 - protein, 239 aa, Sorghum bicolor
MGSNGREHRCGVPRPPPLSLYRDWEEEEVVKVGRRQQSPLEQSTSISATAGIANKKRLSKQVSMKETTREVKWEKRRRQIQRQRSSMRLNEADDRAGSRTVCHVDSEASSSAERVSSKRITDEDLDELRGSMDLGFRFDEHKGGQDLCDTLPALDIYFAVNRQLSEPKMRFSTSSAPSLLATKSSPNLCGTPSPGSPSTHSNNPLESWKICSPGDNPQLVKTRLRHWAQVVACSVKHSS

SEQ ID NO: 247 - DNA, 669 bp, Sorghum bicolor
atgtggagctcagactccgaccccgagctcaccgccgccgccgcgtcgtcctcatcttccacctcgtctgctacctccgtctctgcctccccgccgccgaccccgcctcctgctgcacgccttctccgccaacgcaacggcaaccgccgccgccgccgcagccgcaagcagggcagcgccgtcgccgactctgtcccgccggtccccgagcctgaggcggaggacgtgtggcgcggggcgcagtgggaggcggcgtggccggcgcggcgggacccgaaacccgtggtgctcgcggtcgcgggcggagacgacgcggtggggcggtccaggagcctgacggacgacgacctggaggagctcaagggctgcgccgacctgggcttcggcttcagctacgacgagatccccgagctccgaggcacgctcccggcgctcgagctctgctactccatgacccagcgcctccacctggtggacgacgacaaggacaagccgccgctgctgctgcagcagcacgaaggcgctgccgccgcaccggatgcctccgcgccgtcgccgcccgtcaccaactggaagatctccagccccggtgacagcccggacgaggtgaaggcgcggctcaagtactgggcgcaggcggtggcgtgcaccgttcgcctctgcagctga

SEQ ID NO: 248 - protein, 222 aa, Sorghum bicolor
MWSSDSDPELTAAAASSSSSTSSATSVSASPPPTPPPAARLLRQRNGNRRRRRSRKQGSAVADSVPPVPEPEAEDVWRGAQWEAAWPARRDPKPVVLAVAGGDDAVGRSRSLTDDDLEELKGCADLGFGFSYDEIPELRGTLPALELCYSMTQRLHLVDDDKDKPPLLLQQHEGAAAAPDASAPSPPVTNWKISSPGDSPDEVKARLKYWAQAVACTVRLCS

SEQ ID NO: 249 - DNA, 594 bp, Vitis vinifera
atgaaggaccggcccgaagaacaggtggtattaccttcatcatcttcgtcatcttcgtcttcctgcgtgtttgagtcggaggcaaatgagctgcaggggttggtgttggccccgccgccgtggaagaccaagaagaggctatcgaagcagctgtccatgtgcgagacctcgcgggacattgcatgggagaggcggagaaggcagattctaagacaagagcggaagaaggatggactcaatgactcagaggacctcaccgatgaagacctgcatgagctcaagggctgcatagagctagggtttggcttcaacgaagaggagggtcagaggttgtgcagcactcttcctgccctcgacctttactttgcagtcaacagacagctctcgtttagccccatctccacaccgcattgctcctccgcctcctctttgccgctcgatggctcacttggcggccgatcctcttcatttgggagcccaaggagtgaggattcgtggaaaatatgtagcccaggggataatcctcaacaagtgaagaccaagctgaggcactgggctcaagcagtggcctgttctgtgatgcagtctcattaa

SEQ ID NO: 250 - protein, 197 aa, Vitis vinifera
MKDRPEEQVVLPSSSSSSSSSCVFESEANELQGLVLAPPPWKTKKRLSKQLSMCETSRDIAWERRRRQILRQERKKDGLNDSEDLTDEDLHELKGCIELGFGFNEEEGQRLCSTLPALDLYFAVNRQLSFSPISTPHCSSASSLPLDGSLGGRSSSFGSPRSEDSWKICSPGDNPQQVKTKLRHWAQAVACSVMQSH

SEQ ID NO: 251 - DNA, 474 bp, Vitis vinifera
atgtctgaggcccacgcgccacccctagcgccgccaccggcgcctctatacaagcagcgatcgtggtcgcccgactcgcccgacacctaccgcgacgaggcatggcagcgccgcaagggcaacaacacccgccgctcccgccgccgcagcaagagcgtcaccgacgaggatctggatgagctcaaggcctgcatcgagctcggtttcggcttcgactcgccggatatggatcaacgcttgtccgatactctgccggcgttgggcctttacaaggccgtcaataagcagtacttcgacaccgtcgccaagtcgttgtctccgtcttcatcaacgatgtccgaatgcgatccaccgtctcccctgggcagcccccacaccatattcggtcccggtgataatccacagacggtgaagacaaggttgagacactgggctcaggtggttgcttgttcggtgaggcagagttctggttga

SEQ ID NO: 252 - protein, 111 aa, Vitis vinifera
MSEAHAPPLAPPPAPLYKQRSWSPDSPDTYRDEAWQRRKGNNTRRSRRRSKSVTDEDLDELKACIELGFGFDSPDMDQRLSDTLPALGLYKAVNKQYFDTVAKSLSPSSST

SEQ ID NO: 253 - DNA, 56 bp, Artificial sequence
  primer: prm16186
ggggacaagtttgtacaaaaaagcaggcttaaacaatgaagaactgtcatgagcct

SEQ ID NO: 254 - DNA, 50 bp, Artificial sequence
  primer: prm16187
ggggaccactttgtacaagaaagctgggtagctctgtacaatctatcccg

SEQ ID NO: 255 - DNA, 2194 bp, Oryza sativa; identical to SEQ ID NO: 57

SEQ ID NO: 256 - protein, 99 aa, Artificial sequence
  DUF1685 domain
KKRLSKQLSMCETRRDRAWERRRRQILMQERRRSGLLESDDLTDEDLHELKGCIELGFGFKEEEGHQLTNTLPALDLYFAVNRQLSPSPVSTPQSGDLS

SEQ ID NO: 257 - DNA, 3412 bp, Artificial sequence
  expression cassette pGOS2::DUF::terminator
aatccgaaaagtttctgcaccgttttcaccccctaactaacaatatagggaacgtgtgctaaatataaaatgagaccttatatatgtagcgctgataactagaactatgcaagaaaaactcatccacctactttagtggcaatcgggctaaataaaaaagagtcgctacactagtttcgttttccttagtaattaagtgggaaaatgaaatcattattgcttagaatatacgttcacatctctgtcatgaagttaaattattcgaggtagccataattgtcatcaaactcttcttgaataaaaaaatctttctagctgaactcaatgggtaaagagagagattttttttaaaaaaatagaatgaagatattctgaacgtattggcaaagatttaaacatataattatataattttatagtttgtgcattcgtcatatcgcacatcattaaggacatgtcttactccatcccaatttttatttagtaattaaagacaattgacttatttttattatttatcttttttcgattagatgcaaggtacttacgcacacactttgtgctcatgtgcatgtgtgagtgcacctcctcaatacacgttcaactagcaacacatctctaatatcactcgcctatttaatacatttaggtagcaatatctgaattcaagcactccaccatcaccagaccacttttaataatatctaaaatacaaaaaataattttacagaatagcatgaaaagtatgaaacgaactatttaggtttttcacatacaaaaaaaaaaagaattttgctcgtgcgcgagcgccaatctcccatattgggcacacaggcaacaacagagtggctgcccacagaacaacccacaaaaaacgatgatctaacggaggacagcaagtccgcaacaaccttttaacagcaggctttgcggccaggagagaggaggagaggcaaagaaaaccaagcatcctcctcctcccatctataaattcctccccccttttcccctctctatataggaggcatccaagccaagaagagggagagcaccaaggacacgcgactagcagaagccgagcgaccgccttcttcgatccatatcttccggtcgagttcttggtcgatctcttccctcctccacctcctcctcacagggtatgtgcccttcggttgttcttggatttattgttctaggttgtgtagtacgggcgttgatgttaggaaaggggatctgtatctgtgatgattcctgttcttggatttgggatagaggggttcttgatgttgcatgttatcggttcggtttgattagtagtatggttttcaatcgtctggagagctctatggaaatgaaatggtttagggtacggaatcttgcgattttgtgagtaccttttgtttgaggtaaaatcagagcaccggtgattttgcttggtgtaataaaagtacggttgtttggtcctcgattctggtagtgatgcttctcgatttgacgaagctatcctttgtttattccctattgaacaaaaataatccaactttgaagacggtcccgttgatgagattgaatgattgattcttaagcctgtccaaaatttcgcagctggcttgtttagatacagtagtccccatcacgaaattcatggaaacagttataatcctcaggaacaggggattccctgttcttccgatttgctttagtcccagaattttttttcccaaatatcttaaaaagtcactttctggttcagttcaatgaattgattgctacaaataatgcttttatagcgttatcctagctgtagttcagttaataggtaatacccctatagtttagtcaggagaagaacttatccgatttctgatctccatttttaattatatgaaatgaactgtagcataagcagtattcatttggattattttttttattagctctcaccccttcattattctgagctgaaagtctggcatgaactgtcctcaattttgttttcaaattcacatcgattatctatgcattatcctcttgtatctacctgtagaagtttctttttggttattccttgactgcttgattacagaaagaaatttatgaagctgtaatcgggatagttatactgcttgttcttatgattcatttcctttgtgcagttcttggtgtagcttgccactttcaccagcaaagttcatttaaatcaactagggatatcacaagtttgtacaaaaaagcaggcttaaacaatgaagaactgtcatgagcctaaggctcagaaggtgaatattttatcgtcgtcgtcgtcttcattgccatcattgaactcctcagattctgaagatctggagcgcatgccattggcaccacttatattgaaaaacaagaaacgattgtccaagcaactctcaatgtgcgagactcgacgtgacagagcgtgggagagacgccgccgccaaatactaatgcaagagaggagaaggagcgggctgctagaatctgatgacttgacagatgaagacttgcatgagctcaaagggtgtatagagcttggatttggatttaaagaggaagagggacatcaattgaccaatacattgccagcattggatctctattttgcagttaaccggcaactctcgccaagtccggtgtccacgccgcaaagtggcgacttatcttcttcatcatcttcagcaatgggcacgcgttcatcttcatttgggagccccatgagtgatccagactggaaaatatgcagcccaggtgatgatccaaagcaggttaagaccaagttaaggcactgggcacaagctgtagcttgttcagtcatgcagtcttattgatcaaagtgcgggatagattgtacagagctacccagctttcttgtacaaagtggtgatatcacaagcccgggcggtcttctagggataacagggtaattatatccctctagatcacaagcccgggcggtcttctacgatgattgagtaataatgtgtcacgcatcaccatgggtggcagtgtcagtgtgagcaatgacctgaatgaacaattgaaatgaaaagaaaaaaagtactccatctgttccaaattaaaattcattttaaccttttaataggtttatacaataattgatatatgttttctgtatatgtctaatttgttatcatccgggcggtcttctagggataacagggtaattatatccctctagacaacacacaacaaataagagaaaaaacaaataatattaatttgagaatgaacaaaaggaccatatcattcattaactcttctccatccatttccatttcacagttcgatagcgaaaaccgaataaaaaacacagtaaattacaagcacaacaaatggtacaagaaaaacagttttcccaatgccataatactcgaac

SEQ ID NO: 258 - protein, 20 aa, Artificial sequence
  motif 16
DLTDEDLHELKGCIELGFGF

SEQ ID NO: 259 - protein, 14 aa, Artificial sequence
  motif 17
LTNTLPALDLYFAV

SEQ ID NO: 260 - DNA, 2797 bp, Oryza sativa
tttgtacaaaaaagcaggcttaaacaatgaagctctcgccgtcggccggcggcgtctccgaccagccgccgtcgccgccggaagttgcagaggagcagaagtgcctaaattctgagttgtggcatgcatgcgccggccctctcgtttcgctgcctgcggtcggtagtcgggtggtttattttcctcaaggccacagtgagcaggtagctgcatcaacaaataaggaaatggagtctcagatccccaactatcctaacctgccgccgcagcttatatgccagctacataatgtgaccatgcacgccgatgcagagacggatgaagtctatgcgcaaatgacgctgcagccactcagcccgcaagagctcaaggatccattcctacccgccgagctaggcaccgccagcaagcagccaacaaattatttctgcaaaacgttaactgctagtgacacaagtacacatggtggattctctgttccccgtcgagcagcagagaaagtatttcctccgctggatttcactcagcagcctccagctcaagagttgatggcgaaagacctccatggaaatgaatggaaattccgtcatatctttcgtggccaaccgaagcggcatcttctgactacgggttggagcgtctttgtaagtgcaaagagactggttgctggagactctgtcctttttatctggaatgacagtaatcagctgcttctgggaattcgtcgggcaaataggccacaaacggtcatgccatcatcagtattgtctagtgacagcatgcatattggtctgcttgctgcagctgctcacgccgcatcaacaaatagccggtttactattttctataatccaagagcaagcccttcggagtttgttataccactggctaaatatgtaaaggctgtctaccatacccgcatatcggtgggcatgcgtttccggatgctttttgaaacagaagaatccagtgttaggagatacatggggacaataacaggaataagtgatcttgatcctgttcgttggatgaactcacactggcgctctgtcaaggttggatgggatgagtcgactgctggagagagacagccaagggtgtctctttgggagatcgagcctctgacaactttcccgatgtatccatctccttttcctctcagactaaagcgtccatggccaacaggcttaccttctttatatggcggaaaggaggatgacttggcttcttctcttatgtggcttcgagatagtcaaaacacaggtttccaatctctgaattttggaggacttggtatgagtccgtggatgcagccaaggctggatagttccctacttggtctgcaacctgacatgtaccaaacgatagcggcggcggcggctttacagaacaccactaagcaagtatcacctgccatgctgcagttccagcagccgcaaaacattgtcggtagatcttctcttctatccagtcagattctgcagcaagcacagcctcaatttcagcagatgtaccaccaaaacatcaatggcaactcaatccaaggccatagtcagcctgagtacctccagcaaccgcttcaacattgccaatcatttaacgaacagaagcctcagttgcagccgcagcaacagcagcaagaatcacaccagcagcaacctcagcatcaacaaatgcaacaacagaaacacttgtccaactttcagactgtaccaaatgcattgtcggttttttcacagctttcctccacccctcagtctacaccctccacattgcagacagtttcaccattctcacagcaacataatttccctgacacaaatatcagttgtctctctccatccaatgtctcatccatgcacgatacactgagatcattcccttcagaagctgcttcagacctcccaggtgtgccaagaatcacccctgtacctgtctctgacccatggtcatctaagcgagttgcagtggaatctacgatcacttctcgcccacatgacatttcatcacagatagagaacttcgacttgacaccttctagtattcctcaaaactccacgttagcaccactgcctggaagggaatgcctggtggatcaagatgggagctctgatcctcaaaatcacttcttgtttggtgtaaatatagactcacagtcacttttgatgcaagatggcattccaagccttcacaatgaaaacagttcaagcacaattccatattccacatccaacttccttagcccttctcaagatgattatccattgagtcaaacactaactactccgggctgcttagatgaatcaggatatgttccatgttcagataatgctgatcaagtgaggcgaccgcatgcaacctttgtgaaggtttacaaatctggaaccgttggaaggttgctcgacatcactagatttagcagttatcatgaacttcgtagtgaggtagggcgcctttttggccttgagggccagttggaagaccctttgagatcaggctggcagcttgtatttgttgaccgagaggacgacgttcttctagttggcgatgatccgtggcaggaatttgtgaacagtgtgtcttgcataaagatactttcgccgcaggaggttcagcagatgggcaagccgggcattgaactcttctcgacttctgcaaggagacttggcaacagctgtgacaactacatgagcaggcaggaatcaagaagcctaagcactggaatcgcgtcggtgggctcaattgagttctgagaaataggagctcatagcaacccagctttcttgtacaaagttgg

SEQ ID NO: 261 - protein, 908 aa, Oryza sativa
MKLSPSAGGVSDQPPSPPEVAEEQKCLNSELWHACAGPLVSLPAVGSRVVYFPQGHSEQVAASTNKEMESQIPNYPNLPPQLICQLHNVTMHADAETDEVYAQMTLQPLSPQELKDPFLPAELGTASKQPTNYFCKTLTASDTSTHGGFSVPRRAAEKVFPPLDFTQQPPAQELMAKDLHGNEWKFRHIFRGQPKRHLLTTGWSVFVSAKRLVAGDSVLFIWNDSNQLLLGIRRANRPQTVMPSSVLSSDSMHIGLLAAAAHAASTNSRFTIFYNPRASPSEFVIPLAKYVKAVYHTRISVGMRFRMLFETEESSVRRYMGTITGISDLDPVRWMNSHWRSVKVGWDESTAGERQPRVSLWEIEPLTTFPMYPSPFPLRLKRPWPTGLPSLYGGKEDDLASSLMWLRDSQNTGFQSLNFGGLGMSPWMQPRLDSSLLGLQPDMYQTIAAAAALQNTTKQVSPAMLQFQQPQNIVGRSSLLSSQILQQAQPQFQQMYHQNINGNSIQGHSQPEYLQQPLQHCQSFNEQKPQLQPQQQQQESHQQQPQHQQMQQQKHLSNFQTVPNALSVFSQLSSTPQSTPSTLQTVSPFSQQHNFPDTNISCLSPSNVSSMHDTLRSFPSEAASDLPGVPRITPVPVSDPWSSKRVAVESTITSRPHDISSQIENFDLTPSSIPQNSTLAPLPGRECLVDQDGSSDPQNHFLFGVNIDSQSLLMQDGIPSLHNENSSSTIPYSTSNFLSPSQDDYPLSQTLTTPGCLDESGYVPCSDNADQVRRPHATFVKVYKSGTVGRLLDITRFSSYHELRSEVGRLFGLEGQLEDPLRSGWQLVFVDREDDVLLVGDDPWQEFVNSVSCIKILSPQEVQQMGKPGIELFSTSARRLGNSCDNYMSRQESRSLSTGIASVGSIEF

SEQ ID NO: 262 - DNA, 2727 bp, Oryza sativa
atgaagctctcgccgtcggccggcggcgtctccgaccagccgccgtcgccgccggaagttgcagaggagcagaagtgcctaaattctgagttgtggcatgcatgcgccggccctctcgtttcgctgcctgcggtcggtagtcgggtggtttattttcctcaaggccacagtgagcaggtagctgcatcaacaaataaggaaatggagtctcagatccccaactatcctaacctgccgccgcagcttatatgccagctacataatgtgaccatgcacgccgatgcagagacggatgaagtctatgcgcaaatgacgctgcagccactcagcccgcaagagctcaaggatccattcctacccgccgagctaggcactgccagcaagcagccaacaaattatttctgcaaaacgttaactgctagtgacacaagtacacatggtggattctctgttccccgtcgagcagcagagaaagtatttcctccgctggatttcactcagcagcctccagctcaagagttgatggcgaaagacctccatggaaatgaatggaaattccgtcatatctttcgtggccaaccgaagcggcatcttctgactacgggttggagcgtctttgtaagtgcaaagagactggttgctggagactctgtcctttttatctggaatgacagtaatcagctgcttctgggaattcgtcgggcaaataggccacaaacggtcatgccatcatcagtattgtctagtgacagcatgcatattggtctgcttgctgcagctgctcacgccgcatcaacaaatagccggtttactattttctataatccaagagcaagcccttcggagtttgttataccactggctaaatatgtaaaggctgtctaccatacccgcatatcggtgggcatgcgtttccggatgctttttgaaacagaagaatccagtgttaggagatacatggggacaataacaggaataagtgatcttgatcctgttcgttggatgaactcacactggcgctctgtcaaggttggatgggatgagtcgactgctggagagagacagccaagggtgtctctttgggagatcgagcctctgacaactttcccgatgtatccatctccttttcctctcagactaaagcgtccatggccaacaggcttaccttctttatatggcggaaaggaggatgacttggcttcttctcttatgtggcttcgagatagtcaaaacacaggtttccaatctctgaattttggaggacttggtatgagtccgtggatgcagccaaggctggatagttccctacttggtctgcaacctgacatgtaccaaacgatagcggcggcggcggctttacagaacaccactaagcaagtatcacctgccatgctgcagttccagcagccgcaaaacattgtcggtagatcttctcttctatccagtcagattctgcagcaagcacagcctcaatttcagcagatgtaccaccaaaacatcaatggcaactcaatccaaggccatagtcagcctgagtacctccagcaaccgcttcaacattgccaatcatttaacgaacagaagcctcagttgcagccgcagcaacagcagcaagaatcacaccagcagcaacctcagcatcaacaaatgcaacaacagaaacacttgtccaactttcagactgtaccaaatgcattgtcggttttttcacagctttcctccacccctcagtctacaccctccacattgcagacagtttcaccattctcacagcaacataatttccctgacacaaatatcagttgtctctctccatccaatgtctcatccatgcacgatacactgagatcattcccttcagaagctgcttcagacctcccaggtgtgccaagaatcacccctgtacctgtctctgacccatggtcatctaagcgagttgcagtggaatctacgatcacttctcgcccacatgacatttcatcacagatagagaacttcgacttgacaccttctagtattcctcaaaactccacgttagcaccactgcctggaagggaatgcctggtggatcaagatgggagctctgatcctcaaaatcacttcttgtttggtgtaaatatagactcacagtcacttttgatgcaagatggcattccaagccttcacaatgaaaacagttcaagcacaattccatattccacatccaacttccttagcccttctcaagatgattatccattgagtcaaacactaactactccgggctgcttagatgaatcaggatatgttccatgttcagataatgctgatcaagtgaagcgaccgcatgcaacctttgtgaaggtttacaaatctggaaccgttggaaggttgctcgacatcactagatttagcagttatcatgaacttcgtagtgaggtagggcgcctttttggccttgagggccagttggaagaccctttgagatcaggctggcagcttgtatttgttgaccgagaggacgacgttcttctagttggcgatgatccgtggcaggaatttgtgaacagtgtgtcttgcataaagatactttcgccgcaggaggttcagcagatgggcaagccgggcattgaactcttctcgacttctgcaaggagacttggcaacagctgtgacaactacatgagcaggcaggaatcaagaagcctaagcactggaatcgcgtcggtgggctcagttgagttctga

SEQ ID NO: 263 - protein, 908 aa, Oryza sativa
MKLSPSAGGVSDQPPSPPEVAEEQKCLNSELWHACAGPLVSLPAVGSRVVYFPQGHSEQVAASTNKEMESQIPNYPNLPPQLICQLHNVTMHADAETDEVYAQMTLQPLSPQELKDPFLPAELGTASKQPTNYFCKTLTASDTSTHGGFSVPRRAAEKVFPPLDFTQQPPAQELMAKDLHGNEWKFRHIFRGQPKRHLLTTGWSVFVSAKRLVAGDSVLFIWNDSNQLLLGIRRANRPQTVMPSSVLSSDSMHIGLLAAAAHAASTNSRFTIFYNPRASPSEFVIPLAKYVKAVYHTRISVGMRFRMLFETEESSVRRYMGTITGISDLDPVRWMNSHWRSVKVGWDESTAGERQPRVSLWEIEPLTTFPMYPSPFPLRLKRPWPTGLPSLYGGKEDDLASSLMWLRDSQNTGFQSLNFGGLGMSPWMQPRLDSSLLGLQPDMYQTIAAAAALQNTTKQVSPAMLQFQQPQNIVGRSSLLSSQILQQAQPQFQQMYHQNINGNSIQGHSQPEYLQQPLQHCQSFNEQKPQLQPQQQQQESHQQQPQHQQMQQQKHLSNFQTVPNALSVFSQLSSTPQSTPSTLQTVSPFSQQHNFPDTNISCLSPSNVSSMHDTLRSFPSEAASDLPGVPRITPVPVSDPWSSKRVAVESTITSRPHDISSQIENFDLTPSSIPQNSTLAPLPGRECLVDQDGSSDPQNHFLFGVNIDSQSLLMQDGIPSLHNENSSSTIPYSTSNFLSPSQDDYPLSQTLTTPGCLDESGYVPCSDNADQVKRPHATFVKVYKSGTVGRLLDITRFSSYHELRSEVGRLFGLEGQLEDPLRSGWQLVFVDREDDVLLVGDDPWQEFVNSVSCIKILSPQEVQQMGKPGIELFSTSARRLGNSCDNYMSRQESRSLSTGIASVGSVEF

SEQ ID NO: 264 - DNA, 2754 bp, Oryza sativa
atgaggctttcgtcgtcgtccggcagcgtcctcccggctcaggcggcgtcgccggaagctgtagaagaacaaaaatgcctgaattcggagctctggcatgcgtgtgccggtccccttgtttcgttgcctgcagtgggtagccgagtggtttatttcccacagggtcacagcgaacaggtagctgcatcaacaaataaagaaatggagtctcagatccccaattatcctaacttgcctccacaacttatttgccaacttcacaatgtgacgatgcatgcagatgcagaaacagatgaggtttacgctcagatgacgctacaaccacttagcccgcaagagctcaaggacccatatctaccagctgaattaggttctgccaacaaacagccaacgaattatttttgcaaaacattaacggcaagtgacacaagtacgcatggcggattctctgttccccgtcgagcagctgagaaagtgttccctccgctggattttactcagcagcctccagcacaggagttaattgcaaaagatcttcatggcaatgagtggaagtttcgtcatatctttcgtggtcagccaaagcgacaccttctaactacaggctggagcgtctttgtaagtgcaaagagacttgtcgccggggattctgtcctatttatctggaatgacaacaaccagcttcttctgggaattcgtcgagctaaccgcccacaaactgttatgccatcttcagtcctatctagtgatagcatgcatattggtcttcttgctgcggctgctcatgctgcttcaacaaatagccggtttacaattttttataacccaagagcaagcccttcagagtttgttatcccactttctaaatatgttaaggctgtatatcatacccgtatatctgtgggcatgcgtttcaggatgctttttgagacagaagagtcaagtgtacggagatacatgggcacgataacaggaattagtgatcttgatgctgctcgttggccaaactcacattggcgttctgtaaaggttggctgggatgaatcaactgccggagagaggcagccaagggtgtcgctttgggagattgagcccttgacaactttcccaatgtacccatctccttttccactcagactgaagcgtccatggccaacaggcttgccttcattacatggtggtaaggatgacgacttgacttcttctctcatgtggctccgagacagcgcaaatcctggtttccaatcattgaatttcgggggtctcggtatgaatccttggatgcagccaaggtttgatgcttccttacttggtctgcaacctgacatgtatcaaacgatagctgcgactgctttccaggacccaacaaagcaggtctctcccacgatattgcagttccagcagccgcagaacataggtggcagagctaatacacttctgccaagtcagattttgcagcaagtgcagcctcagtttcagcagcagcaatacctccaaaacatcaacgagaccacaatccaagggcatgctcagtctgagttccttcagcagcagctccaacgctgccagtcgtttactgagcagaagccacagctgcaaacccagcaacaacagcaagaatcacagcaacaacagcagcagcaatcgcagtgtatgcaagtcccacaacatcagcaaatgcaacagcagaagaacatgaccaactatcagtctgtacctaatgcattgtcaccgttttctcaactctcctctccttctcagtcttcacctatgacactgcaaacagtattaccattctcccagccacagagctatccagacacgagtatgagctcattgtcaccatccaacacatccaccatgcataatgcattgaggccattttcatcggaagcaccttcgcacctaagcatgccaagaccgactgcagtacctgtccctgacccatggtcatcgaagcgagttgcagtggagtctttgcttccctctcgtcctcaggttacatcgcagatggagcagttggactcaacagcacctagtataccacaaagctctgcgttggcgccgcttcctggaagaggatgcttggtggatcaagatgggaactctgatcctcaaaaccatctgttatttggcgttaacatagattcacagtcacttctaatgcaaggtggcatcccaagcctccagggtgagaatgattcgacggcaattccttattccacctccaatttcctgagcccgtcgcagaatgatttccccttggatcaaacactaagtagtgcagactgcttagatgaatcaggatatgtgccgtgttcacagaattctgatcaagtgattaatcgaccacctgcgacctttgtgaaggtttacaaatcgggaacctatggaaggtcacttgatatcactagatttagtagctatcatgaacttcgtagagaactagggcgcctatttggccttgagggccagttggaaaaccctttgagatcaggctggcagcttgtattcgtcgaccgagaggatgatgtcctcctcgttggcgacgacccttggcaggaattcgtgaatagcgtctcctgcataaagatactttcaccacaggaggtgcagcagatgggcaagccctttgagcttttgagctcggctcccggaaagaggctaggtagcagctgtgatgactatgtgagcaggcaggaatcaagaagcctgagcacaggaattgcatctgtcggctcagttgaattctga

SEQ ID NO: 265 - protein, 917 aa, Oryza sativa
MRLSSSSGSVLPAQAASPEAVEEQKCLNSELWHACAGPLVSLPAVGSRVVYFPQGHSEQVAASTNKEMESQIPNYPNLPPQLICQLHNVTMHADAETDEVYAQMTLQPLSPQELKDPYLPAELGSANKQPTNYFCKTLTASDTSTHGGFSVPRRAAEKVFPPLDFTQQPPAQELIAKDLHGNEWKFRHIFRGQPKRHLLTTGWSVFVSAKRLVAGDSVLFIWNDNNQLLLGIRRANRPQTVMPSSVLSSDSMHIGLLAAAAHAASTNSRFTIFYNPRASPSEFVIPLSKYVKAVYHTRISVGMRFRMLFETEESSVRRYMGTITGISDLDAARWPNSHWRSVKVGWDESTAGERQPRVSLWEIEPLTTFPMYPSPFPLRLKRPWPTGLPSLHGGKDDDLTSSLMWLRDSANPGFQSLNFGGLGMNPWMQPRFDASLLGLQPDMYQTIAATAFQDPTKQVSPTILQFQQPQNIGGRANTLLPSQILQQVQPQFQQQQYLQNINETTIQGHAQSEFLQQQLQRCQSFTEQKPQLQTQQQQQESQQQQQQQSQCMQVPQHQQMQQQKNMTNYQSVPNALSPFSQLSSPSQSSPMTLQTVLPFSQPQSYPDTSMSSLSPSNTSTMHNALRPFSSEAPSHLSMPRPTAVPVPDPWSSKRVAVESLLPSRPQVTSQMEQLDSTAPSIPQSSALAPLPGRGCLVDQDGNSDPQNHLLFGVNIDSQSLLMQGGIPSLQGENDSTAIPYSTSNFLSPSQNDFPLDQTLSSADCLDESGYVPCSQNSDQVINRPPATFVKVYKSGTYGRSLDITRFSSYHELRRELGRLFGLEGQLENPLRSGWQLVFVDREDDVLLVGDDPWQEFVNSVSCIKILSPQEVQQMGKPFELLSSAPGKRLGSSCDDYVSRQESRSLSTGIASVGSVEF

SEQ ID NO: 266 - DNA, 2700 bp, Oryza sativa
atgaagctctctccgccggcgtcggcggatatgccgcaggccttgccggagaacgacggggaacaaagatgtctgaactcggagctgtggcatgcatgcgctgggccccttgtgtctttgccagtggtcaggagcagggtcgtctactttccacagggccatagcgagcaggttgcggcatcaactaataaggaagttgatgctcaaatcccaaattatccaaacttacctcctcagttaatctgccagcttcataatgtcaccatgcatgctgatgcagagacagatgaagtttatgctcagatgacattgcaaccattgagcccggaagagcaaaaggagcctttccttccaatggagttgggtgctgctagcaagcaacccactaattacttctgcaagacattgactgcaagtgacacgagcactcatggtggtttctctgttccccgccgggcagctgagaaagtcttccctccactagatttttcacagcagcctccggcacaggagctgattgcaagagatttgcatgataatgaatggaaatttcgccatatatttcgtggtcagcctaaaaggcatctcctgacaacaggctggagtgtgtttgtgagtgcgaaaagactagtagcaggagactctgttatatttatctggaatgataacaatcaacttcttttgggaatacgtcgtgcaaatcgccaacagactgttatgccctcttccgtgttgtcaagcgatagcatgcatataggtcttcttgcagcagcagctcatgctgcagccacaaatagtcgcttcactattttctataaccccagggctagcccttctgaatttgtgattccattggccaagtatgtgaaagctgtttaccacacacgtgtatctgttggaatgcgttttagaatgcttttcgagacagaggagtcaagtgtcaggcgatacatgggtacaatcaccagcataagtgatctagattcagtgcgctggccaaactcacactggcgttctgttaaggttggttgggatgagtccaccactggtgataaacagccaagggtttctctttgggagattgagcctttgacaacctttccgatgtaccccagtgcttttcctttaagacttaagcgtccgtgggcttcaggactgcctatgcatggcatgttcaatggtgggggaaatgacgattttgcacgctattcttctctcatgtggcttcgagacggaaatagaggaacccagtccctgaattttcaaggacatggagtctcaccatggcttcagccaagaatagattctccattgctgggccttaagccagacacgtaccagcaaatggctgcagcagcactggaagaaattcgatatggggacccttcaaagcagcatccagctactctgcaataccaacagactcataatctgaacagtggattaaattctctgtttgcaagccatgttctagggcaggtgcagtttcaacctcagcagtcacccctgcaagttgttcagcaaggccattgtcagaacactggtgactctgggttccttcaaggtcagcttccacggctgcagttgcataacactcagcagctgctaaaggagcaagagttgcagcagcagcaaagacagcatgttttacaagagcaatctagtcaagagatgcaacagcagctcccatctagtgatcatcatgttgctgatgtagcttctgagtctggatctgctcctcaggcacaatcatcattgcttagtggatcatcattctacaatcagaacctcttagaaggaaatagtgatccccctttacatctacacaacaatttccacaacttctctaaccaggaagcctcaaaccttcttattttgcctcgaagtagccaattaatggcatcagatgggtggccttcaaagcgattaactttagaatctgctgttcatcctgaagctccgtccatgcaccccaagattgagaaagtaaatcaccagggtatatctcattttcctggcgcctttccaccacaatcagcaagaggctgttccatcgtccaggattgcagggcagatgctgagaaccgcctactttcatcatcatttgaactccaggatggcatgacaagcatcataactgatgctaacagagaaactgatactatggccatacctttgttgagatatagtggtgcagatttgacaactgaaaacaccttagcaacctccaattgtttaggtgaatctggaacgttcaatcctcttaataacatatctgtaaatccatcacaaggagcaacctttgtgaaggtttacaaatcagggtcccttgggagatcacttgacatctccagattcagcagctactgcgagttacgtagtgagcttgagcgtctctttggtcttgaaggccaactggaggaccctgtaagatcaggctggcagcttgtatttgtcgaccgggaaaatgacattcttctcgtcggcgacgatccatggcaggagtttgcaaatagcgtatggtgcatcaaaatactctcgccacaggaggtgcagcagttggttcgtggtggagacggccttctgtcctcacctggagcaaggatgcagcagagcaatgcctgcgacgactattctgcaagccacaacatgcagaatatcgccggaaacattgcatctgtagcgcctctggactactga

SEQ ID NO: 267 - protein, 899 aa, Oryza sativa
MKLSPPASADMPQALPENDGEQRCLNSELWHACAGPLVSLPVVRSRVVYFPQGHSEQVAASTNKEVDAQIPNYPNLPPQLICQLHNVTMHADAETDEVYAQMTLQPLSPEEQKEPFLPMELGAASKQPTNYFCKTLTASDTSTHGGFSVPRRAAEKVFPPLDFSQQPPAQELIARDLHDNEWKFRHIFRGQPKRHLLTTGWSVFVSAKRLVAGDSVIFIWNDNNQLLLGIRRANRQQTVMPSSVLSSDSMHIGLLAAAAHAAATNSRFTIFYNPRASPSEFVIPLAKYVKAVYHTRVSVGMRFRMLFETEESSVRRYMGTITSISDLDSVRWPNSHWRSVKVGWDESTTGDKQPRVSLWEIEPLTTFPMYPSAFPLRLKRPWASGLPMHGMFNGGGNDDFARYSSLMWLRDGNRGTQSLNFQGHGVSPWLQPRIDSPLLGLKPDTYQQMAAAALEEIRYGDPSKQHPATLQYQQTHNLNSGLNSLFASHVLGQVQFQPQQSPLQVVQQGHCQNTGDSGFLQGQLPRLQLHNTQQLLKEQELQQQQRQHVLQEQSSQEMQQQLPSSDHHVADVASESGSAPQAQSSLLSGSSFYNQNLLEGNSDPPLHLHNNFHNFSNQEASNLLILPRSSQLMASDGWPSKRLTLESAVHPEAPSMHPKIEKVNHQGISHFPGAFPPQSARGCSIVQDCRADAENRLLSSSFELQDGMTSIITDANRETDTMAIPLLRYSGADLTTENTLATSNCLGESGTFNPLNNISVNPSQGATFVKVYKSGSLGRSLDISRFSSYCELRSELERLFGLEGQLEDPVRSGWQLVFVDRENDILLVGDDPWQEFANSVWCIKILSPQEVQQLVRGGDGLLSSPGARMQQSNACDDYSASHNMQNIAGNIASVAPLDY

SEQ ID NO: 268 - DNA, 2808 bp, Arabidopsis thaliana
atgagattatcttcagctgggtttaatcctcaacctcatgaagttacaggagagaaaagagttcttaattctgagctctggcatgcttgtgctggtcctcttgtctcactacctcctgttggaagcagagttgtgtattttcctcaaggtcacagtgaacaggttgctgcttcgaccaacaaagaagtagatgctcatataccaaattatccgagcttgcatccgcagcttatctgtcagcttcataatgttacaatgcatgctgatgtggagactgatgaagtctatgcacagatgactttgcaaccgttgaatgcgcaagagcaaaaagatccttaccttcccgcggaattaggtgtcccaagtagacagcctacaaactatttctgtaaaactctgactgctagtgatacaagcactcacggaggtttttctgtacctcgccgagctgctgagaaagttttccctcccttggattactcgcagcagccaccagctcaagagttaatggcgagggatctgcatgataatgaatggaagttcaggcatattttccgaggccaaccaaagagacatctccttaccacgggttggagcgtatttgtgagtgctaaaaggcttgttgctggtgactctgttcttttcatctggaacgataagaatcaattacttcttggtataagacgagccaaccgaccacaaactgtcatgccttcatctgttttgtcaagtgacagtatgcatttaggccttcttgctgcagcagctcatgctgccgctacaaacagccgattcaccatcttctataacccgagggcgagtccatcagagtttgttatacccctggctaagtatgtgaaagcggtttatcacactcgcgtctctgttggtatgcggtttaggatgctgtttgaaactgaagaatctagtgttcgtcggtacatgggtacaataactggcatttgtgatctagatcctactcgttgggctaattcgcattggcgatctgtcaaggttgggtgggacgaatctactgcaggagagagacagccaagggtttcattgtgggagattgagcctttaacaacattccctatgtatccatctccttttcctctcaggcttaaacggccgtggcctcctggtctcccatctttccatggccttaaagaagatgatatgggtatgagtatgagttcaccgcttatgtgggatcgaggactccaatctctaaactttcaaggtatgggagtaaacccgtggatgcagccgagacttgatacgtcgggcttgcttggtatgcaaaatgatgtgtaccaagcaatggctgcagctgcccttcaagacatgagaggcattgatcctgcaaaagctgctgcttcacttcttcagttccaaaattcgccggggttctcaatgcaatctccgtccttagtgcagccgcagatgctgcagcagcaactctctcagcagcagcaacaactctctcagcagcagcagcagcagcaacagctctcccaacagcagcagcaacagctctctcaacagcagcagcagcagctctctcaacagcagcagcaacaactctctcagcagcagcagcaacaggcgtatcttggcgttcctgaaacccaccagcctcagtctcaggctcaatcacagtcaaacaatcatctttctcagcagcagcagcaagtagtggataatcataatccgtctgcgtccagtgctgctgttgtttccgctatgtctcaatttggttctgcttctcagcccaacacgtcaccactccagtccatgacctctctgtgtcatcagcaaagcttctccgataccaacggaggaaacaatcctatttctccacttcacactcttctcagtaacttctctcaagacgaatcttctcaactgctccacctcactagaacaaactctgcaatgacttcatccggttggccatcaaagcgtcctgcagttgattcatcgttccagcactctggagccggtaataataacactcaatccgtattggagcaactgggacagtcccacacaagcaacgttcctccaaacgctgtctcgttgcctccatttcccggtggtagagagtgctcgatcgagcaagaaggaagcgcctcagacccgcatagccatcttctctttggagtcaatatagattcatcttctcttttgatgccgaacggaatgtcaaaccttagaagcattggtattgaaggtggtgactccacgactttacccttcacatcatctaatttcaacaatgatttctcgggtaatcttgcaatgacaacaccttctagttgcatagatgaatcgggttttctacaatcctcagaaaacctcggttccgagaacccacaatctaacacctttgtgaaggtgtacaagtcagggtcttttggaagatcgttagatatatcaaagtttagcagctaccacgagctgcgaagcgagcttgctcgcatgtttggcctcgaaggccaattagaagaccctgtgagatcaggctggcagcttgtatttgttgaccgagagaacgacgttcttctcctcggcgatgacccttggccggagtttgtgagcagcgtgtggtgcattaagatactgtcaccacaagaagtgcaacaaatgggaaaaagaggccttgagcttctcaactccgcgccatcttccaacaatgtcgataagctcccgagcaacgggaactgtgacgactttgggaaccggtcagacccgaggaatctcggtaacggtatcgcatcagttgggggttcattcaactactag

SEQ ID NO: 269 - protein, 935 aa, Arabidopsis thaliana
MRLSSAGFNPQPHEVTGEKRVLNSELWHACAGPLVSLPPVGSRVVYFPQGHSEQVAASTNKEVDAHIPNYPSLHPQLICQLHNVTMHADVETDEVYAQMTLQPLNAQEQKDPYLPAELGVPSRQPTNYFCKTLTASDTSTHGGFSVPRRAAEKVFPPLDYSQQPPAQELMARDLHDNEWKFRHIFRGQPKRHLLTTGWSVFVSAKRLVAGDSVLFIWNDKNQLLLGIRRANRPQTVMPSSVLSSDSMHLGLLAAAAHAAATNSRFTIFYNPRASPSEFVIPLAKYVKAVYHTRVSVGMRFRMLFETEESSVRRYMGTITGICDLDPTRWANSHWRSVKVGWDESTAGERQPRVSLWEIEPLTTFPMYPSPFPLRLKRPWPPGLPSFHGLKEDDMGMSMSSPLMWDRGLQSLNFQGMGVNPWMQPRLDTSGLLGMQNDVYQAMAAAALQDMRGIDPAKAAASLLQFQNSPGFSMQSPSLVQPQMLQQQLSQQQQQLSQQQQQQQQLSQQQQQQLSQQQQQQLSQQQQQQLSQQQQQQAYLGVPETHQPQSQAQSQSNNHLSQQQQQVVDNHNPSASSAAVVSAMSQFGSASQPNTSPLQSMTSLCHQQSFSDTNGGNNPISPLHTLLSNFSQDESSQLLHLTRTNSAMTSSGWPSKRPAVDSSFQHSGAGNNNTQSVLEQLGQSHTSNVPPNAVSLPPFPGGRECSIEQEGSASDPHSHLLFGVNIDSSSLLMPNGMSNLRSIGIEGGDSTTLPFTSSNFNNDFSGNLAMTTPSSCIDESGFLQSSENLGSENPQSNTFVKVYKSGSFGRSLDISKFSSYHELRSELARMFGLEGQLEDPVRSGWQLVFVDRENDVLLLGDDPWPEFVSSVWCIKILSPQEVQQMGKRGLELLNSAPSSNNVDKLPSNGNCDDFGNRSDPRNLGNGIASVGGSFNY

SEQ ID NO: 270 - DNA, 2736 bp, Sorghum bicolor
atgaagctctcgccgtcggccagcggtggcctccaggaccagccggggtcgccggaagaagctgaagagcacaagtgcctaaattctgagttgtggcatgcatgtgccggccctctcgtttcattgcctgcggtcggtagtcgagtggtgtattttcctcaaggccacggtgagcaggtagcagcgtcgacaaataaggaaatggaggctcagatccccaactatcctagcctgcctccgcagcttatatgccaactgcataatgtgaccatgcatgctgatgctgagacagatgaggtgtatgcacagatgaccctgcagccactcagcccacaagagctcaaggacccatttttgcctgctgagttaggcactgccagcaagcagccaacgaattatttttgtaaaacgctaactgcaagtgatacgagcacacatggtggattctctgttccacgccgagcagcagagaaggtgtttcctccactggatttcaatcagcagcctcctgctcaggagttgattgcaacagatcttcatggcaatgagtggaaatttcgccatatttttcggggtcagccaaagcggcatcttctgacaacaggttggagtgtctttgttagtgcaaagagactggttgctggcgactctgtcctttttatctggaatgacaacaaccagctgcttctgggaattcgtcgggcaaacagaccacaaactgtcatgccatcatcagtactttctagtgatagcatgcatattggtctgcttgctgcagcagctcatgctgcatcaacaaatagccggtttactattttctataatccaagagcaagcccttgtgaatttgtcatacccatggctaagtacgtcaaagctgtgtaccatacccgtatatctgtgggcatgcgtttccggatgctttttgagacagaggaatccagtgtaaggcgttacatggggacaattacaggaataagtgatcttgatcctgttcgctggccaaactcgcactggcgctcagtaaaggttggatgggacgagtcaactgctggagagaagcagccaagggtatctctttgggagattgaaccattgacaacttttccaatgtacccatctccttttgctcttggattaaagcgtccgtggcctacaggcctgccatctttatatggtggaagggatgatggcttgacctcttctcttatgtggcttcgagacagggcaaatccgggtttccagtcactgaatttcagtgggcttggtacaagtccctggatgcagcctaggctggataattcccttcttggtctgcaatctgacatgtaccagacaatagcagcagcagcagcattacagagcactacaaagcaagtttcaccttcagtaatgcagttccagcagcctcagaatattgttgatagatctgctcttctatccagtcagattctgcagcaagtacaacctcagtttcagcaaatttacccccaaaatctcaatgaaaacaaaattcaaggtcagacggagtacctccaacaacagcttcaacgctgccaatcatttaatgagcagaagcctccgctgcattcgcagcaacaggagcaggaatcacagcagcagcaatgtgtgcaaacaccacaggatcaacaaatgcaacaacagaagcatctgcacaactttcactccttgccagatgcattatcggctttttctcagctttcctcagccactcactccccatcttccacactgcagacagttccggcattctcgcatcaacaaaactttccagatacaaacattagctctctctcaccatccagtggctcttccatgcatggcatgttggggcaattaccttctgaagcagcttcgagcctcccatgtgtggcaataaacactcctgtatcagtatctgacccatggtcatctaagagagttgcagtggagtctgttaacccttctcgacctcatgttgtttcaccacagatagaacaattggatatggcatcatgtaacatgccacaaagctctgcattagcaccgttacctgggagagaatgcttagtggatcaagatgggaactctgatcctcaaaatcacctcttatttggtgttaacatagactcacagtcacttttgatgcaaggtggcattccaagccttcagaatgataacagttcaggcacgattccatactcaacctccaatttcctgagctcttcacagaatgatttccccttgaatcaatcactacatagtgcgggctgcttagatgagtcaggttatgctccatgtgcagagaattctgaacaagcaaatcaacagtttgcaacctttgtcaaggtttacaaatctggaaacgtgggaaggttgctggatatcactagattcagcagctatgatgaacttcgtagtgaggtggggcgtctatttggccttgagggccagttggaagaccctttgagatcaggctggcagcttgtatttgttgacagagaggacgatgtccttctagttggcgatgacccgtggcaggaatttgtgaacagcgtgtcctgtataaagatactttcaccggaggaggttcagcagatgggcaagccgggcattcagctcttgagctcggctccttcaagaaggctgagcaatggctgcgacagctatgcgagcatgcaggaatcaagaagcctgagcactgggatggcgccagtgggttcggtcgagttctga

SEQ ID NO: 271 - protein, 911 aa, Sorghum bicolor
MKLSPSASGGLQDQPGSPEEAEEHKCLNSELWHACAGPLVSLPAVGSRVVYFPQGHGEQVAASTNKEMEAQIPNYPSLPPQLICQLHNVTMHADAETDEVYAQMTLQPLSPQELKDPFLPAELGTASKQPTNYFCKTLTASDTSTHGGFSVPRRAAEKVFPPLDFNQQPPAQELIATDLHGNEWKFRHIFRGQPKRHLLTTGWSVFVSAKRLVAGDSVLFIWNDNNQLLLGIRRANRPQTVMPSSVLSSDSMHIGLLAAAAHAASTNSRFTIFYNPRASPCEFVIPMAKYVKAVYHTRISVGMRFRMLFETEESSVRRYMGTITGISDLDPVRWPNSHWRSVKVGWDESTAGEKQPRVSLWEIEPLTTFPMYPSPFALGLKRPWPTGLPSLYGGRDDGLTSSLMWLRDRANPGFQSLNFSGLGTSPWMQPRLDNSLLGLQSDMYQTIAAAAALQSTTKQVSPSVMQFQQPQNIVDRSALLSSQILQQVQPQFQQIYPQNLNENKIQGQTEYLQQQLQRCQSFNEQKPPLHSQQQEQESQQQQCVQTPQDQQMQQQKHLHNFHSLPDALSAFSQLSSATHSPSSTLQTVPAFSHQQNFPDTNISSLSPSSGSSMHGMLGQLPSEAASSLPCVAINTPVSVSDPWSSKRVAVESVNPSRPHVVSPQIEQLDMASCNMPQSSALAPLPGRECLVDQDGNSDPQNHLLFGVNIDSQSLLMQGGIPSLQNDNSSGTIPYSTSNFLSSSQNDFPLNQSLHSAGCLDESGYAPCAENSEQANQQFATFVKVYKSGNVGRLLDITRFSSYDELRSEVGRLFGLEGQLEDPLRSGWQLVFVDREDDVLLVGDDPWQEFVNSVSCIKILSPEEVQQMGKPGIQLLSSAPSRRLSNGCDSYASMQESRSLSTGMAPVGSVEF

SEQ ID NO: 272 - DNA, 2760 bp, Sorghum bicolor
atgaggctctcgtcgtcgtccggcagcgtcatcccggcggctcagccgggctcgccggaagctgtggaggagcacaagtgcctgaactcggagttgtggcatgcctgtgccggtccgcttgtttccttgcccgcggtgggtagccgggtcgtgtacttccctcagggccacagcgagcaggtagcagcatcaactaacaaggaaatggagtctcagatccccaattatcctaatctgccgccacagcttatatgccaactgcataatgtgacgatgcatgctgatgcagagacagacgaggtatatgcacagatgacactgcagccactcaacccgcaagaactgaaggacccatatttacctgcagaattaggttcggccaataaacagccaacaaactatttctgcaaaacattaacagcaagtgacacaagtacccatggtgggttctctgttccccgtcgagcagctgagaaagtgtttcctccactggatttcacccagcaacctccatgccaggagttgatggcaaaagatcttcatggcaatgagtggaaattccgtcacatctttcgtggtcagccaaagagacatcttctaactacaggttggagtgtctttgtaagtgcaaagagacttgttgctggtgactctgtcctttttatctggaatgacaataaccagcttctgcttggaattcgtcgggcaaatcggccgcaaactgtcatgccatcttcagtcttatcaagtgatagcatgcatattggtcttcttgctgcagctgctcatgctgcttcgacaaatagccggtttacaattttctacaacccaagggcaagcccttcagagtttgtcataccgcttgcaaagtatgttaaggctgtgtatcatacccgtatatccgtggggatgcgcttcaggatgctttttgagacagaagagtctagcgttaggagatacatgggaacaattaccggaatcagtgatcttgattccgttcggtggccaaattcacattggcgttctgttaaggttggctgggatgaatcaactgctggtgagaggcagcctagggtgtcactatgggagattgagcccctgacaactttcccaatgtatccatctccttttccgctcaggcttaagcgtccatggccaacaggcttgccttctctgcatggtgggaaggatgatgacctggctaactctctcatgtggcttcgagatgccgcaaatcctggttttcagtcgttaaattttggtggacttggtatgaacccttggatgcagccaaggctggatgcttccttacttggtctgcaacctgacatgtatcaggcgatggccacagctgctttccaggatccaacaaagcaggtatcatcacccacaatgctgcagttccagcaaccacagaacatagctggccgggctacgccacttctttcaagtcagattttgcagcaatcacatcctcaatttcagcagcaacagtaccttcaaaacatctcagagagtacaatccaagcgcagggtcagtctgagttcctcaaacagcagatccaacgcagccagtcgttcaatgagcagaagccccagctgcagccccagcagcaacagcaagaatcacagcagcagcagcagcagcaatcacagtgtctgcaagtccctcaacatcaacaaatgcaacaacataacatgaccaactatcagtctgtatctaatgcattgtcagcattttctcagctgtcgtcagcctctcagtcttcacctgtgtcactgcaaacaatattaccgttctcacaggcacagagctttacagatacaaatgtaagctcattgtctccatccaacaccaacaccatgcaaaatacactgaggccattctcatcagaagcagtttctcacctcagtatgccgaggcccactgcaatacctgtctccgacccatggtcatcgaagcgtgttgcagtggagtctttgcttccttctcggcctcaggtttcgtcccagatggaacaattggactctgcaccagccagtatacctcatagctctgcattggcaccgcttcctggaagaggatgcttggtggatcaagatgtgaactctgatcctcaaaatcatgtcttgtttggtgttagtatagattcacagtcactgctaatgcaaggaggcatccctggtctccaaaatgggaatgattcaactgctataccttattccacctccaatttcctgagcccttcacagaatgattttcctttagatcatacactaaattctccaggttgcttagatgattctgggtatgtgccgccatgttcagataattctgaccaagtgaaccgaccaccagcgaccttcgtgaaggtttacaaatctggaacctatggaaggtcgcttgatatcactaggtttagtagctatcatgagctccgtagggaactagggcgcctatttggccttgagggccagttggaagaccctttgagatcaggctggcagcttgtattcgtcgaccgtgaggaggatgtccttctcgtgggcgacgacccttggcaggaattcgtgagcacggtgtcctgcataaagatactctcgccgcaggaggtgcagcagatgggcaagcaggggctggagctcctgagctcaggccctgcgcggaggctaggtagcagctgtgacgactacgttagcaggcaggagtcgagaagcctgagcaccgggatcgcgtccgtcgggtcggtcgagttctga

SEQ ID NO: 273 - protein, 919 aa, Sorghum bicolor
MRLSSSSGSVIPAAQPGSPEAVEEHKCLNSELWHACAGPLVSLPAVGSRVVYFPQGHSEQVAASTNKEMESQIPNYPNLPPQLICQLHNVTMHADAETDEVYAQMTLQPLNPQELKDPYLPAELGSANKQPTNYFCKTLTASDTSTHGGFSVPRRAAEKVFPPLDFTQQPPCQELMAKDLHGNEWKFRHIFRGQPKRHLLTTGWSVFVSAKRLVAGDSVLFIWNDNNQLLLGIRRANRPQTVMPSSVLSSDSMHIGLLAAAAHAASTNSRFTIFYNPRASPSEFVIPLAKYVKAVYHTRISVGMRFRMLFETEESSVRRYMGTITGISDLDSVRWPNSHWRSVKVGWDESTAGERQPRVSLWEIEPLTTFPMYPSPFPLRLKRPWPTGLPSLHGGKDDDLANSLMWLRDAANPGFQSLNFGGLGMNPWMQPRLDASLLGLQPDMYQAMATAAFQDPTKQVSSPTMLQFQQPQNIAGRATPLLSSQILQQSHPQFQQQQYLQNISESTIQAQGQSEFLKQQIQRSQSFNEQKPQLQPQQQQQESQQQQQQQSQCLQVPQHQQMQQHNMTNYQSVSNALSAFSQLSSASQSSPVSLQTILPFSQAQSFTDTNVSSLSPSNTNTMQNTLRPFSSEAVSHLSMPRPTAIPVSDPWSSKRVAVESLLPSRPQVSSQMEQLDSAPASIPHSSALAPLPGRGCLVDQDVNSDPQNHVLFGVSIDSQSLLMQGGIPGLQNGNDSTAIPYSTSNFLSPSQNDFPLDHTLNSPGCLDDSGYVPPCSDNSDQVNRPPATFVKVYKSGTYGRSLDITRFSSYHELRRELGRLFGLEGQLEDPLRSGWQLVFVDREEDVLLVGDDPWQEFVSTVSCIKILSPQEVQQMGKQGLELLSSGPARRLGSSCDDYVSRQESRSLSTGIASVGSVEF

SEQ ID NO: 274 - DNA, 3658 bp, Triticum aestivum
  CDS (595)..(2922)
gagcaccgagaacaagaagtgcacttcccctccctctctctcgcttctactccctagtagcacgagcagccaggaagctacaggcaagaagcagcagcagcagcagaggcagcttgctcgccaccggcgacggcgggcggatctgccgtggagccacggccgggtcctccggagccgggagcagccgttccggagcccgtggcggcgagatctgaggcgccgctgccttctcgcaatcgggaggcgcgcttctttgcctagctcccgcggccgcaaaggcggcgcattcccgccgccgccgccgcctgctcccgaaggcctcccggaggcggggctggggcgcttggatcgagaggctcgaaaattcggagttcccggatcgaaaaggaccgcgcgttcgggccgggtgcggcggagcggaggcaagaggtttggcttggccggtttgggggaggagacagcgatggtgatgctgtttggaagcgctcgtgatttggtgtagaaacaggaaaacaaagcctctttcgttttctctgctccctcgcctctccgtctcgtgggctcctgtgttgccttctagctctctcgtcaagcatgaatctctcgccgtccgccggcggcggcggcctgccggatcagccagcgtcgcccgaagcatcagaagagcacaggtgcctaaattcagagttgtggcacgcctgtgccggacccctcgtttctttgcctgcagtcggcagccgggtgttgtattttcctcaaggtcacagtgagcaggtatcggcatcaacaaacaaggaaatggagtcgcagatccccaactatccgaatctgcctccacagcttatatgccaactgcataatgtgaccatgcacgctgatgcagagacagacgaggtctatgcacaaatgacgttacagccactcagcccacaagaactcaaggacccatttctacctgctgagttgggcaatgctagcaaacaaccaacgaattatttctgcaaaacattaactgcaagtgataccagtacccatggtggattctctgttccccgccgagcagcggagaaggtgtttcctccgctggatttcactcagcagcctccagcacaggagttggtggcaaaagaccttcatggcaatgagtggaaattccgccatatctttcgaggtcaaccaaagcggcatcttctgacgacaggttggagcgtctttataagtgcgaagagactggtcgctggagactctgtcctatttatctggaatgacaacaatcagctgcttctgggaatacgtcgagcaaatagatcgcagacggttatgccatcatcagtattgtctagtgacagcatgcatataggtcttcttgctgcagctgctcatgctgcatcaacaaatagccggttcactattttctataatccaagagcaagcccttcggagtttgtcataccattggctaagtatgtaaaggctgtgtaccatacccgtatatctgtgggcatgcgtttccggatgcttttcgagacagaagaatccagtgtcaggcgatacatgggaacaattacaggaataagtgaccttgatcctgctcgttggccgaactcacactggcgttctgttaaggttggatgggatgagtcaactgctggagagaggcaaccaagggtgtctctttgggagattgagcctctgacgacttacccgatgtattcatctcctttccctatgcggctgaagcggccttggccaacaggattgccttccttatatggtacaggtggaaaggaggatgacttgacctcttctctcatgtggcttcgagatggagcaaacccaggttttcagtcattcagttttggtggacttggtatgagtccttggatgcagccaatgatggatagttccctacttggtctgcaacctgacatgtaccaagcaatgtcagcagcagcttttcagaacacgacgaagcaagtatcgcctacactgctgcagttccagcagcctcagaacattgctggtagatctgctcttctatcgagtcagattctgcagcaagtgcagcctcagtttcaggagatgcaccaccaaaacatcaatgacagtgcaatccaaggccataatcagtctgagtacctccagcaacagcttcagcgctgccaatcctttaatgggcagaaatcgccgccgccgcagcagcaagaatcacaccaccagcaccagcagcaacagtcacagtgcatgcaaacaccacaacatcaacaaatgcaagaacagaagcactcgcctgactttcagtgtgtaccaaatgggttgtcggttttctcccagctttcctccaccaatcagtctccaccttccacattgcagacagtttcagcgttctcacagcagcagaaccttcaagacagaaatatcagctctctttctccatcgaatgtcccgtccatgcatgacacattgagaccatttccttcagaagcaggttcgaacctccaaggcgtgccaagaaccacccctgtgcctgtctctgacccatggtcatctaagcgggttgcaatggagtctgtgatcccttctagctctcatgttaactcgccgcatatacaacacctggattcagcgccttctaatataccacaaagctcctcattagcaccattgcctggaagagagtgcttggtggatcaagatgggaattctgataatcaaaatcacctcttatttggtgttaatatagactctcagtcacttctaatgcaaggtggcattcccagccttcaggaggacaatggttgcattgcaagccttcaggacgacaatgattcgagcacgattccatattccacgtgcaatttcctgagcccttctcagaatgattttccgttgaatgaagcactagctagtcaggctgcttagatgaatcaggatacgcgtcattttcggaaaattctgatcatgtaaatcaaccgactgcagcgttcgtgaaggtgtacaaatctggagcctttggaaggttgctggacatcactaagtttagcagctaccatgaacttcgtagcgaggtagggcgcctatttggccttgacggccagttggaggaccctgcaagatcaggctggcagcttgtatttgttgaccgagaggatgatatccttctagttggcgatgatccgtggcaggaattcgtcaacagcgtatcttgcataaaggtacttacgccacaggaggtgcagcagatgggaaagcagggcatcgacctcctgagctcggctcctgcgaggaggctcggcaacagttgtgataactacgctggcaggcaggaatcgagaagcctgagcaccgtaatcgcgtcggtgggttctgtcgagttctgaagatatggagcctgcgaccctcggcttttaagtatgtttctgcagctcgtcctagtcttgtgaactggaaccaaagcacatagatcaagtgtagcgcaaagccgtcagcgttccgatgtttatgtcatgcatgtgatatagaccattttagtagtaactatgacatatttggtatgtacgccgatgcggatttgttccgcggaataccaatgctgttgatgtagggcctctaatattagactccttacccgtgttgcctaaaaaaaaaaaaaaaacga

SEQ ID NO: 275 - protein, 775 aa, Triticum aestivum
MNLSPSAGGGGLPDQPASPEASEEHRCLNSELWHACAGPLVSLPAVGSRVLYFPQGHSEQVSASTNKEMESQIPNYPNLPPQLICQLHNVTMHADAETDEVYAQMTLQPLSPQELKDPFLPAELGNASKQPTNYFCKTLTASDTSTHGGFSVPRRAAEKVFPPLDFTQQPPAQELVAKDLHGNEWKFRHIFRGQPKRHLLTTGWSVFISAKRLVAGDSVLFIWNDNNQLLLGIRRANRSQTVMPSSVLSSDSMHIGLLAAAAHAASTNSRFTIFYNPRASPSEFVIPLAKYVKAVYHTRISVGMRFRMLFETEESSVRRYMGTITGISDLDPARWPNSHWRSVKVGWDESTAGERQPRVSLWEIEPLTTYPMYSSPFPMRLKRPWPTGLPSLYGTGGKEDDLTSSLMWLRDGANPGFQSFSFGGLGMSPWMQPMMDSSLLGLQPDMYQAMSAAAFQNTTKQVSPTLLQFQQPQNIAGRSALLSSQILQQVQPQFQEMHHQNINDSAIQGHNQSEYLQQQLQRCQSFNGQKSPPPQQQESHHQHQQQQSQCMQTPQHQQMQEQKHSPDFQCVPNGLSVFSQLSSTNQSPPSTLQTVSAFSQQQNLQDRNISSLSPSNVPSMHDTLRPFPSEAGSNLQGVPRTTPVPVSDPWSSKRVAMESVIPSSSHVNSPHIQHLDSAPSNIPQSSSLAPLPGRECLVDQDGNSDNQNHLLFGVNIDSQSLLMQGGIPSLQEDNGCIASLQDDNDSSTIPYSTCNFLSPSQNDFPLNEALASQAA

SEQ ID NO: 276 - DNA, 2727 bp, Vitis vinifera
atgaggttgtctcctgctgggttcacacaccagacccaggaaggggagaagagatgtctgaattctgaactttggcatgcatgtgcgggccctcttgtttccctacctgctgttggaagcagagtggtttattttccacaaggtcatagtgagcaggttgctgcatcaacgaacaaggaagtggatgctcatatccctaactatcctagcttacccccacaacttatctgtcagcttcacaatgtgaccatgcatgcagatgtggagacggatgaagtatatgcgcagatgacgttacaaccattgagtccacaagagcaaaaggatgcgtacctcccagcagagttgggtgtgcccagcaaacagccatcgaattatttctgtaaaacattgacagctagtgacacaagtacacatggaggcttctctgttcctcgccgagcagctgaaaaagtgtttcctcctttggacttttcacagcagcctccagcccaagagttaattgcaagggatcttcatgataatgaatggaaatttaggcatatatttcgaggtcagcccaaaaggcatcttcttacaacaggttggagtgtatttgtaagtgcgaaaagacttgttgctggggattcggttctttttatctggaatgagaagaatcagttactacttggtatccggcgtgctaatcgaccacaaactgttatgccatcatcggttttatcaagtgatagcatgcacttagggcttttggctgctgcagctcatgcagctgcaacaaatagccgtttcactatattttataatccaagggctagcccatctgaatttgtcataccattggccaagtatgctaaagcagtctatcatacacgtgtttctgttggcatgcgctttcggatgctgtttgaaactgaagaatcaagtgtccgtcgctacatgggcacgataactggcataagcgatttagatcctgttcggtggccaaactcccattggcgctcagtgaaggtgggctgggatgagtccacggcaggggagaggcaacccagagtgtccctatgggagattgaacctttaacgaccttcccaatgtatccttctccatttcctctcagactaaagagaccatggccaccagggctaccctctctccatggcatcaaggatgatgatttaggaatgaattcaccacttatgtggctccgaggagataatgtagaccgtggaatccaatctctgaactttcagggaatcggggttaatccttggatgcaaccaaggcttgacgcttccatgctgggtctgcagacagacatgtaccaagctatggctgctgctgctcttcaggagatgagggctgtggatccatccaaacaggcacctgcaccccttctgcattaccagcaaccccaaaatgttgccagcaggtcttcttgtataatgcagccccagatgttgcagcaatctcagcctcaacaggcctttcttcaaggcatacatgaaaacaccaaccaggctcaatctcagactcagtctcaccttcttcagcaacatttgcagcatcagcactcattcaataataataataacaataataatcagcagcagcagcccgcccccccgccgcaacaaccacaacagcaattggtcgatcatcagcggatcccgagtgttgtttctgccatctctcagtttgcttcagcctctcaatcccagtcaccatctttgcaaaccatctcttctctgtgccaacagcagagcttttccgactcaactggtaacccagggacgagcccaattatttctcccctccagagtcttttgggttcattcccccaggatgagtcatccaacctcctcaacatgcctagaagcacttcccttatgccgtctgctgcctggctgcccaagcgggttgcggttgaacctcttcttccttctggtgcttcacaatgtattctgccccaagtggaacagttgggacaaccccaaacaaacatctctcagaattctatttcactgccaccatttcctggtagagagtgctccattgaccaagaagggagcactgatccccagagccatcttttgtttggcgttaatatagagccctcatctttgctaatgcagaatgggatgtcaggtctcaggggagttggcagtgaaagtgattcaacggccatacccttctcttcatccaattttatgagttctacaggcaccgatttttcacttaatccagcaatgacaccttccagttgcattgatgaatctggtttcctgcagtctccagaaaatgtgggccaagtaaacccaccaacccgaacctttgttaaggtttacaaatcagggtccttcggaagatcactagatatcactaaattcagcagctaccatgaactgcgtggtgagcttgctcgcatgtttggccttgaaggccagttggaggaccctcggagatcaggctggcagcttgtatttgttgaccgggagaatgatgttcttctccttggtgatgacccctggccggagtttgtaaacagcgtgtggtgtatcaagatactctcactacaggaagtgcagcagatgggaaaacgagggttagagcttctgaactcggtccccatacaaaggctcactagtagcagctgtgatgactatgcaagccggcaggactcaagaaatttgagcactgggatcacatctgtggggtctcttgactactga

SEQ ID NO: 277 - protein, 908 aa, Vitis vinifera
MRLSPAGFTHQTQEGEKRCLNSELWHACAGPLVSLPAVGSRVVYFPQGHSEQVAASTNKEVDAHIPNYPSLPPQLICQLHNVTMHADVETDEVYAQMTLQPLSPQEQKDAYLPAELGVPSKQPSNYFCKTLTASDTSTHGGFSVPRRAAEKVFPPLDFSQQPPAQELIARDLHDNEWKFRHIFRGQPKRHLLTTGWSVFVSAKRLVAGDSVLFIWNEKNQLLLGIRRANRPQTVMPSSVLSSDSMHLGLLAAAAHAAATNSRFTIFYNPRASPSEFVIPLAKYAKAVYHTRVSVGMRFRMLFETEESSVRRYMGTITGISDLDPVRWPNSHWRSVKVGWDESTAGERQPRVSLWEIEPLTTFPMYPSPFPLRLKRPWPPGLPSLHGIKDDDLGMNSPLMWLRGDNVDRGIQSLNFQGIGVNPWMQPRLDASMLGLQTDMYQAMAAAALQEMRAVDPSKQAPAPLLHYQQPQNVASRSSCIMQPQMLQQSQPQQAFLQGIHENTNQAQSQTQSHLLQQHLQHQHSFNNNNNNNNQQQQPAPPPQQPQQQLVDHQRIPSVVSAISQFASASQSQSPSLQTISSLCQQQSFSDSTGNPGTSPIISPLQSLLGSFPQDESSNLLNMPRSTSLMPSAAWLPKRVAVEPLLPSGASQCILPQVEQLGQPQTNISQNSISLPPFPGRECSIDQEGSTDPQSHLLFGVNIEPSSLLMQNGMSGLRGVGSESDSTAIPFSSSNFMSSTGTDFSLNPAMTPSSCIDESGFLQSPENVGQVNPPTRTFVKVYKSGSFGRSLDITKFSSYHELRGELARMFGLEGQLEDPRRSGWQLVFVDRENDVLLLGDDPWPEFVNSVWCIKILSLQEVQQMGKRGLELLNSVPIQRLTSSSCDDYASRQDSRNLSTGITSVGSLDY

SEQ ID NO: 278 - DNA, 2751 bp, Cucumis sativus
atgaggctttcaactgctggttttagtcctcaggctccggaaggggagaggagagttcttaactcggagctttggcatgcatgtgctggcccacttgtttctctacctgctgttggaagtcgggttgtttattttccacagggtcatagcgagcaggttgccatatcaaccaacagagaagttgatgcccatataccaagttatccaagcttgccaccacagctaatctgccagcttcacaatgttacaatgcatgcagatattgagacagatgaagtgtatgcccaaatgaccttgcaaccgctcactgctcaagagcaaaaggagccttatcttccagctgagttgggtgcccccagcaaacaaccaaccaactatttttgtaaaacattgacagcaagtgacactagtacacatggaggattttctgttcctcgtcgtgcagctgagaaagtgtttcctccattggacttctctcagcagcctcctgcacaggagttaattgcaagggatctgcatgataatgagtggaaatttaggcatatctttcgtggccaaccgaaaaggcatctccttacaactggatggagtgtgtttgtaagtgctaagaggcttgttgctggcgattcggttatctttatttggaatgaaaagaatcaattactgttggggatccgtcgagctaatcgaccacaaacagtgatgccctcgtcggttctgtccagtgacagcatgcacttggggcttcttgctgctgcagcacatgcagctgctacaaatagtcggttcacgatattttataatccaagggctagcccatcagagttcatcatacctctggccaagtatgtcaaagctgtgtaccatacccgtgtttctgttggtatgcgttttagaatgctatttgaaacagaagaatcaagtgttcgtcgttacatgggcactattactggtatcagtgatttagattctacccggtggccaaattcacactggcgctcagtcaaggttggatgggatgaatctacagctggggagagacagccaagggtttccttatgggagatcgagccacttacaaccttcccaatgtatccttctccatttcccctcaggcttaagcgcccctggccaactggatttccctctttccatggtcttaaagaggacgatctgggattaaattctcaactaatgtggcttcggggagatggtctagatcgtggaattcaacctctgaacttccctggaattggagttgcaccatggatgcagccaaggcttgatgcttctatggtcggtctgcagccggagatatatcaagcaatggctgctgctgcactacaggagatgagaaccgtagatcctgctaaggcgcaggctgcttcgcttcttcaattccaacaaactcaaaatcttcccaacaggcctgctaatttcatgccacctcagatgttgcagcagcctcagcctcagcctcagcctccacagacctttcttcaaggtgatgaaaaccaacatctctctcattctcaggcccaaagccagcctactgctgttcttcagcaggagataaagcatcaaacattcaacaaccacccccagcagcagcagcagcagcaacaacaacaacaacagcagcaacagcaaccacaacagcaagtgtttgatcaccatcaaattccaagtcccatgtctacaatgtctcagttcagttctgcttcccaatcccaagcccaatccctgcaaactattcctccattatgtcggcaacagagtttttctgattcaaatcccaaccatgtgacaagtcccatcatttcacccttgcacagcctattaggtggttcattttcacaagatgaatcatctcagatgcttaaccttcctcgaaacaatcccatgatacattcatctacatggccgtcaaagcgagctgcaatcgatcctcttctctcttcaggaaattctcagtttgttctttcccaaggggaaaatatagggacaactccggctaatatctctcagaatgcttttacattgccgccttttcctgggagagagtgttcattagatcaagggaatgtcgatccgcagagtaatcttctgtttggtgtcaatatagagccttcatctcttctaatgcagaatggcatgccaaatcttaggggaatttgcagtgacagtgactcaacagctatacctttttcttcgaattatgtgaatactgctggtaccaacttctctgccaatccaactgggacagggacaccttccaattgcaatgaggattcaggtttcttgcattctccagaaaacactggccaagtaaacccaccaaccacaacctttgtaaaggtttacaagtcggggtccttcggtagatcactggatatttccaaattcagtagataccatcagctacgcagtgagcttgctcacatgttcggccttgaaggcgaattggaggaccctttgagatcaggttggcagcttgtattcgttgaccgggaaaatgacgtccttcttcttggggacgatccctggccggagtttgtcaacagcgtgtggtgtatcaaaatactatcaccacaggaagtgcaggacatgggcaaacgtggcctagagctcttgaactctgtcccgattcagaggctctcaaatggcagttgtgataactacgccaacagacaggagtcatccagaaatatgaattctgggattacttctgtcgggtctcttgagtactga

SEQ ID NO: 279 - protein, 916 aa, Cucumis sativus
MRLSTAGFSPQAPEGERRVLNSELWHACAGPLVSLPAVGSRVVYFPQGHSEQVAISTNREVDAHIPSYPSLPPQLICQLHNVTMHADIETDEVYAQMTLQPLTAQEQKEPYLPAELGAPSKQPTNYFCKTLTASDTSTHGGFSVPRRAAEKVFPPLDFSQQPPAQELIARDLHDNEWKFRHIFRGQPKRHLLTTGWSVFVSAKRLVAGDSVIFIWNEKNQLLLGIRRANRPQTVMPSSVLSSDSMHLGLLAAAAHAAATNSRFTIFYNPRASPSEFIIPLAKYVKAVYHTRVSVGMRFRMLFETEESSVRRYMGTITGISDLDSTRWPNSHWRSVKVGWDESTAGERQPRVSLWEIEPLTTFPMYPSPFPLRLKRPWPTGFPSFHGLKEDDLGLNSQLMWLRGDGLDRGIQPLNFPGIGVAPWMQPRLDASMVGLQPEIYQAMAAAALQEMRTVDPAKAQAASLLQFQQTQNLPNRPANFMPPQMLQQPQPQPQPPQTFLQGDENQHLSHSQAQSQPTAVLQQEIKHQTFNNHPQQQQQQQQQQQQQQQQPQQQVFDHHQIPSPMSTMSQFSSASQSQAQSLQTIPPLCRQQSFSDSNPNHVTSPIISPLHSLLGGSFSQDESSQMLNLPRNNPMIHSSTWPSKRAAIDPLLSSGNSQFVLSQGENIGTTPANISQNAFTLPPFPGRECSLDQGNVDPQSNLLFGVNIEPSSLLMQNGMPNLRGICSDSDSTAIPFSSNYVNTAGTNFSANPTGTGTPSNCNEDSGFLHSPENTGQVNPPTTTFVKVYKSGSFGRSLDISKFSRYHQLRSELAHMFGLEGELEDPLRSGWQLVFVDRENDVLLLGDDPWPEFVNSVWCIKILSPQEVQDMGKRGLELLNSVPIQRLSNGSCDNYANRQESSRNMNSGITSVGSLEY

SEQ ID NO: 280 - DNA, 2745 bp, Populus trichocarpa
atgaggcactcttcggcttcttttaatccacaaacccaggaaggggagaagcgggtgctgaattctgaactatggcacgcatgtgcgggtcctcttgtttctctacctgctgttggaagccgtgttgtttatttcgctcaaggtcatagtgagcaggttgctgcttcaacgaacaaggaagtggatgcccggattccaaactacccaagcttgcctccgcaacttatctgtcagcttcacaacgtgaccatgcatgcagatgtcgagacggatgaagtttatgcacaattgaccttgcagccactaagtccacaagagcaaaaggatgcctaccttccagcagatttgggcacccctagcaaacagccaaccaattatttttgtaagactttgactgctagcgatacaagtactcatggaggattctctgtccctcggcgggcagctgagaaagttttccctccactggatttttctcagcaacctccagctcaagagttgattgctagggatctacatgataatgaatggaaattcagacacatctttcgcggccagccaaaaagacaccttcttacaacagggtggagtgtgtttgtgagtgctaaaagacttattgctggggattcagtgcttttcatctggaatgaaaagaatcagctactacttggcattaagcgtgctactcgacctcaaactgtgatgccttcatcagtcttatctagcgatagcatgcacttgggccttcttgctgctgcagctcatgcagctgcaacaaatagccgttttacaatattttacaatccaagggctagtccatcagaattcatcataccgttggctaaatatcttaaagctgtttattatactcgagtgtctgttggcatgcgctttaggatgctgtttgaaactgaagaatcaagtgtccgtcggtacatgggtacgataactggcataagtgacttagatgttgctagatggccaaattcactttggcgctcagtcaaggttggctgggatgagtctacagctggggagaggcaaccaagagtttctctatgggagattgaaccactaacaactttcccaatgtatccatctacatttcccctaaggctcaagcggccatggacaccaggactacactctttccacggcaagcttctctacaccatcttaagggctttgatggatggcatcaaggatgatgatctgggaatgaactcttctcttatgtggctaagaggagatggagaccgtggaattcaatctctgaaccttcagggaatgggtgttgcaccatggatgcagccaagagttgatacttccatgctaggtttgcaaaatgatgtctaccaaactatggctactgctgcgtttcaggagatgagggctcttgatccttctaaatcatcagctgcatcccttttgcaattccagcaacaccagaatctcccaatcaggaatgctgctttaatgcagccgcttatgttgcagcagtctccttctcaacaggcctttcttcaaggtgttcaagaaaataaacatcagtctcagcctcagtctcagactccaactcggtcacaccttattcatcaactgcagcatcagcactcacttgacagtccagagcagcagcagccacttctgcaacaacagcatctggctgaccaacagatcccaaatgttgtctctgcaatatctcaatatgcttcagctactcaatccctgacgccaccattgcaagcaatttcactgtgtcagcaacacagtttttctgactcaaatgggaacctcgtgacaagccctgttgtttctcccctgcaaagtcttttgggctcatttccccaggacgaaacatctcatttgttcaattttcctagaacaaaccccttgacaacatcctctggctggccctccaagcgagctgctgttgaccctcttatctcctctgtagctcctcaatgcatgatgagccaagtggagcagctggggccacctcagacaagcatctctcctagctctgtttccttgctgccctttcctggcagagaatgtccaacagagcaggatggtggcactgatccacaaagccatcttctatttggtgtcagtatagagccctcttctcttctaatgcagaatggattgtcaagcctcaggggagttggaagtgatagtgattcaacaactgtacctttctcttctaattacatgagtattgcaggcaccaatttctctcttaatccagcaatggcaccttcaagttgcattgatgaatcaggtttcctccagtccatggaaaatgtgggccaaggaaatccaccatctagaacctttgttaaggtttacaagtcagggtcctttggtaggtcactggatataaccaaattcagcaactacaatgagttgcgaagtgagcttgcattcatgtttggccttgaaggccaactggaggaccccctgagatcaggctggcagcttgtattcatcgaccgggagaatgatgttcttctccttggtgatggcccctggccggaatttgtaaacagcgtgtggtgcatcaaaatactctcaccgcaagaagtacagcaaatgggcaaacgaggtttagagcttctgaacagtgtcccaattcagaggctttccaatggcagctgtgatgactatgtaaaccggcaggattcacaaaatttgagcaatgctataacttctgtggggtctttggactgccgagaaatttaa

SEQ ID NO: 281 - protein, 914 aa, Populus trichocarpa
MRHSSASFNPQTQEGEKRVLNSELWHACAGPLVSLPAVGSRVVYFAQGHSEQVAASTNKEVDARIPNYPSLPPQLICQLHNVTMHADVETDEVYAQLTLQPLSPQEQKDAYLPADLGTPSKQPTNYFCKTLTASDTSTHGGFSVPRRAAEKVFPPLDFSQQPPAQELIARDLHDNEWKFRHIFRGQPKRHLLTTGWSVFVSAKRLIAGDSVLFIWNEKNQLLLGIKRATRPQTVMPSSVLSSDSMHLGLLAAAAHAAATNSRFTIFYNPRASPSEFIIPLAKYLKAVYYTRVSVGMRFRMLFETEESSVRRYMGTITGISDLDVARWPNSLWRSVKVGWDESTAGERQPRVSLWEIEPLTTFPMYPSTFPLRLKRPWTPGLHSFHGKLLYTILRALMDGIKDDDLGMNSSLMWLRGDGDRGIQSLNLQGMGVAPWMQPRVDTSMLGLQNDVYQTMATAAFQEMRALDPSKSSAASLLQFQQHQNLPIRNAALMQPLMLQQSPSQQAFLQGVQENKHQSQPQSQTPTRSHLIHQLQHQHSLDSPEQQQPLLQQQHLADQQIPNVVSAISQYASATQSLTPPLQAISLCQQHSFSDSNGNLVTSPVVSPLQSLLGSFPQDETSHLFNFPRTNPLTTSSGWPSKRAAVDPLISSVAPQCMMSQVEQLGPPQTSISPSSVSLLPFPGRECPTEQDGGTDPQSHLLFGVSIEPSSLLMQNGLSSLRGVGSDSDSTTVPFSSNYMSIAGTNFSLNPAMAPSSCIDESGFLQSMENVGQGNPPSRTFVKVYKSGSFGRSLDITKFSNYNELRSELAFMFGLEGQLEDPLRSGWQLVFIDRENDVLLLGDGPWPEFVNSVWCIKILSPQEVQQMGKRGLELLNSVPIQRLSNGSCDDYVNRQDSQNLSNAITSVGSLDCREI

SEQ ID NO: 282 - DNA, 2451 bp, Cucumis sativus
atgcatgcagatgccgagacagatgaagtatatgctcagatgactctgcaacccttgagtgctcaagaattaaaggaagcctaccttccagctgagttgggcactccaagtaggcagccaacgaattacttttgcaaaactttgacagcaagtgataccagcacacatggaggtttctctgttcctcgccgtgctgctgaaaaagtattccctcctttggacttctctatgcagcccccagcccaagagctgattgcgagggacttgcatgataatgagtggaaatttagacatatatttcgcggccagcctaaaagacaccttctaacaactggatggagtgtcttcgtgagtgctaaaagacttgttgctggcgacgctgtactttttatctggaatgagaagaaccaattactccttggaattaggcgtgctagtcgaccacaaacggtgatgccttcatccgtgctgtcaagtgatagcatgcatctagggcttcttgctgcagcagctcatgcagcagctaccatcagtcggtttacaatattttttaacccaagggctagcccttcagagtttgtcataccactggccaaatatgtgaaggcagtctaccatactcgtgtttctgttggcatgcgctttaggatgctgtttgaaacggagaatcaagtgttcgtcgctacatgggcacaatcactggcattagtgacttggatccctgtaagatggcaaaactcacattggcgctcggtcaaggttggctgggatgagtcgacagctggagagcgacagccgaaagtgtctttgtgggaaattgaaccactaacaacgtttccaatgtatccatcaccgtttccacttaggctgaagcgaccctggccaactggactgccttcttttggcatcaaggatagtgaccttggaatgaattctccattcatgtggctacggggagataatagtgatcgcggcatccagtgtctaaactttcagggagctggggtctcaccatggatgcagccaaggcttgatccatccatgatgggtatgcaatctgacatgtatcaagtcatggctactgcagctcttcaggagatgagggcaattgattattccaaaatatcacctgcatctgttcttcaattccagcagccccaaagccttccttgtcagtcttctaccttaatgcagcctcagatgttgcatcagtctcaacctcagcaggcgtttctacaatccgtacaagaaaaccagcagcattcgcagccgcagtctcaaactcagtcgcatcatcttcagccgcaattgccccagcaatcattcaataatcattcacagcaacatcaacagcaaccaaggcagaaccaaccactcgatcatcagcagattccttcttctatccctgctatatctcagtttgcttcatgttctcaatcccagtcaccgtccttgcaaactgtcccttccctttgccaacaaccaagtttttctgattccaatggtaaccctgcaactagtcctactgtttccccattgcatagccttgcaggttcgtttgtgcaagatgacttttctcagctgcttaaccttcaaagagcacattcagtaattccttcagctggttggccatcaaagagagctgctatcgatcctctctgtactggagcttctcaatattttctacctcaagttgaaatgttaggaacacaacagagtagtatttctcagaatactgttgcattgccacccttccctggaagggaatgtcctattgatgacagagaagagagttctgatcctcaaaaccatgttttatttggggcgaatatagattcttcatcccttctaatgcaaaatgggatgtcaacccttaggggagtttgcaatgatagtgtttctacaactctacctttttcttccaattatatgagcactgctggtaccaattttcctgtaaatccaactatgacatcctcgaattgcatcgatgaatcgggtctcctgcagtctcatgaaaatgtgggccaagtaaacccacccaacggaacctttgtcaaggttcacaaatcggggacctacagtaggtcgttagacataaccaaattcaacagctatcctgagctacgcagcgagcttgctcgcatgtttggcttagaaggcgagttggaagatcctttgagatcaggctggcagcttgtatttgttgaccgggagaatgacgttcttcttcttggtgatggcccgtggccggagtttgtaaacagtgtgtggtgcatcaaaatactttcaccagaagaagttcaggacatgggaaaacgaggtttagaacttctgaactctgtgccaattcagaggctttccaacagcacctgcgacgactatggcagtcgacaggactcaagaaatttgatttcagggatagcctctgtcgggcctcttgactactga

SEQ ID NO: 283 - protein, 816 aa, Cucumis sativus
MHADAETDEVYAQMTLQPLSAQELKEAYLPAELGTPSRQPTNYFCKTLTASDTSTHGGFSVPRRAAEKVFPPLDFSMQPPAQELIARDLHDNEWKFRHIFRGQPKRHLLTTGWSVFVSAKRLVAGDAVLFIWNEKNQLLLGIRRASRPQTVMPSSVLSSDSMHLGLLAAAAHAAATISRFTIFFNPRASPSEFVIPLAKYVKAVYHTRVSVGMRFRMLFETENQVFVATWAQSLALVTWIPVRWQNSHWRSVKVGWDESTAGERQPKVSLWEIEPLTTFPMYPSPFPLRLKRPWPTGLPSFGIKDSDLGMNSPFMWLRGDNSDRGIQCLNFQGAGVSPWMQPRLDPSMMGMQSDMYQVMATAALQEMRAIDYSKISPASVLQFQQPQSLPCQSSTLMQPQMLHQSQPQQAFLQSVQENQQHSQPQSQTQSHHLQPQLPQQSFNNHSQQHQQQPRQNQPLDHQQIPSSIPAISQFASCSQSQSPSLQTVPSLCQQPSFSDSNGNPATSPTVSPLHSLAGSFVQDDFSQLLNLQRAHSVIPSAGWPSKRAAIDPLCTGASQYFLPQVEMLGTQQSSISQNTVALPPFPGRECPIDDREESSDPQNHVLFGANIDSSSLLMQNGMSTLRGVCNDSVSTTLPFSSNYMSTAGTNFPVNPTMTSSNCIDESGLLQSHENVGQVNPPNGTFVKVHKSGTYSRSLDITKFNSYPELRSELARMFGLEGELEDPLRSGWQLVFVDRENDVLLLGDGPWPEFVNSVWCIKILSPEEVQDMGKRGLELLNSVPIQRLSNSTCDDYGSRQDSRNLISGIASVGPLDY

SEQ ID NO: 284 - DNA, 2676 bp, Solanum melongena
atgagggtgtcttcatctgggttcaatcctcagccagaggaagcaacaggggagaaaaaatgcttgaattcggagctgtggcacgcttgtgcaggaccattagtatcacttccacctgtaggaagcagagtagtttattttcctcaagggcatagtgagcaggttgctgcttcaaccaacaaggaagtagatgctcatatccctaattatcctggtttaccacctcaactaatttgtcagcttcacaacctgacaatgcatgcagatgttgagactgatgaagtatatgctcaaatgacattgcagccactaagtccacaagagcaaaaggatgtgtgcctgctacctgcagaacttggcatccccagtaaacaaccaaccaactatttctgcaaaaccttgacggcaagtggcaccagtactcatggtggattctctgtccctcgccgagcagcagaaaaagttttcccccctcttgattactctcagcagccaccttgtcaagagttgattgcaaaagatctccatgggaatgaatggaaattccggcatatttttcgcggacaaccaaagaggcatctattgacaacaggatggagtgtgtttgtgagtgcaaaaagacttgttgcaggtgatgcggtcatctttatctggaatgaaaacaatcaattgcttttggggattcgacgtgccaatcgtcctcaaactgtcatgccttcttcggtcttgtcaagtgatagcatgcacattggtctcctagctgcagcagctcatgcagccgcaactaatagccgctttacaatattttacaatccaagggctagcccgtcagagtttgtcatacctcttgccaagtatgttaaagcagtgtatcacactcgaatttctgttggtatgaggttccggatgctgtttgaaacagaagaatcgagtgtccgaaggtacatgggcacaattactggcatcagtgacttagatcctgttcgttggccgaattcacactggcggtccgtgaaggttggatgggatgaatcaactgcaggagacaggcagcccagagtttctctgtgggaaattgaacctctgacaactttccctatgtatccttctcctttctccctaaggctaaagcggccttggccatctggattaccttctcttactggttttcctaatggtgatatggctatgaattctccgctctcatggctgcgtggtgacatgggagatcagggaatgcagtcgcttaatttccagggttttggtgttactccatttatgcaaccaagaatggatgcttctttgttaggcttgcaacctgacattctgcaaacaatggcagcactagatccatcgaaacttgcaaatcagtcccttatgcagttccaacaaagtattcctaacagttcagcatctttgagtcagagtcagatgttgcagccttctcattcacatcaaaatctgatccaaggcttctcagaaaaccacttaatatctcaggctcagatgcttcagcagcagttgcagcgccgtcaaaattttaatgatcaacagcaattgcttcagccacagcttcagcagcaccaggaagtgaactcacagtttcaacatcaacagcgaaccaaggccatctccagtctctctcagatggcttcagttacacagccccatctttctcatttgccagtcttaagttcaactggttcccagcaaaccttttctgatatgctgggtacccatgtcaattcatctagcaattctaatatgcaaagtctattgagttcattttcccgtgatggagcacctgctgtcctgaacatgcatgaaacacaccctctagtgtcttcgtcctcatcatcaaagcgaattgctctagaatctcagctcccttctcgggttactccatttgttttatcccagcccgagaatgtgatagcacccaatactaaggtctcagatctttcctctttactgccaccttttcctggcagggaatctttttctgattataaaggagcagaagatagccaaagcaatgcactctatggatttacagactctttgaacatactgcagaccggtatgtccaacatgaagggtagcagtggtgataatggatctttatctattccttatgctatctctaccttcacaagtactgtgggcaatgagtatccccttaactcagacatgacagcttcaagttgtgtggatgaatcaggtttcttgcagtcctccgaaaatggggaccaagcaaaccaaactaatagaatctttgtgaaggttcaaaaatcagggtcctttggacggtcactcgatatctccaaatttagcagctatcacgaacttcgaagtgagcttgctcgcatgtttgggctagaaggcttgttggaggaccctgagagatcaggctggcagcttgtaattgttgaccgagagaatgatgtcctcctcctcggtgacgatccttggcaggagttcgtgaataatgtttggtacatcaagatactctctccatatgaagtgcagcagatggggaaagagggccttgatcttctaaatggcgtccgaacacagaggcttcctggcaatgtcaatggatgtgatgactatatgaaccagaagggttcccgaaatactatgaacgggataccattggggtcacttgactactaa

SEQ ID NO: 285 - protein, 891 aa, Solanum melongena
MRVSSSGFNPQPEEATGEKKCLNSELWHACAGPLVSLPPVGSRVVYFPQGHSEQVAASTNKEVDAHIPNYPGLPPQLICQLHNLTMHADVETDEVYAQMTLQPLSPQEQKDVCLLPAELGIPSKQPTNYFCKTLTASGTSTHGGFSVPRRAAEKVFPPLDYSQQPPCQELIAKDLHGNEWKFRHIFRGQPKRHLLTTGWSVFVSAKRLVAGDAVIFIWNENNQLLLGIRRANRPQTVMPSSVLSSDSMHIGLLAAAAHAAATNSRFTIFYNPRASPSEFVIPLAKYVKAVYHTRISVGMRFRMLFETEESSVRRYMGTITGISDLDPVRWPNSHWRSVKVGWDESTAGDRQPRVSLWEIEPLTTFPMYPSPFSLRLKRPWPSGLPSLTGFPNGDMAMNSPLSWLRGDMGDQGMQSLNFQGFGVTPFMQPRMDASLLGLQPDILQTMAALDPSKLANQSLMQFQQSIPNSSASLSQSQMLQPSHSHQNLIQGFSENHLISQAQMLQQQLQRRQNFNDQQQLLQPQLQQHQEVNSQFQHQQRTKAISSLSQMASVTQPHLSHLPVLSSTGSQQTFSDMLGTHVNSSSNSNMQSLLSSFSRDGAPAVLNMHETHPLVSSSSSSKRIALESQLPSRVTPFVLSQPENVIAPNTKVSDLSSLLPPFPGRESFSDYKGAEDSQSNALYGFTDSLNILQTGMSNMKGSSGDNGSLSIPYAISTFTSTVGNEYPLNSDMTASSCVDESGFLQSSENGDQANQTNRIFVKVQKSGSFGRSLDISKFSSYHELRSELARMFGLEGLLEDPERSGWQLVIVDRENDVLLLGDDPWQEFVNNVWYIKILSPYEVQQMGKEGLDLLNGVRTQRLPGNVNGCDDYMNQKGSRNTMNGIPLGSLDY

SEQ ID NO: 286 - DNA, 1188 bp, Oryza sativa
gaggagcagaagtgcctaaattctgagttgtggcatgcatgcgccggccctctcgtttcgctgcctgcggtcggtagtcgggtggtttattttcctcaaggccacagtgagcaggtagctgcatcaacaaataaggaaatggagtctcagatccccaactatcctaacctgccgccgcagcttatatgccagctacataatgtgaccatgcacgccgatgcagagacggatgaagtctatgcgcaaatgacgctgcagccactcagcccgcaagagctcaaggatccattcctacccgccgagctaggcactgccagcaagcagccaacaaattatttctgcaaaacgttaactgctagtgacacaagtacacatggtggattctctgttccccgtcgagcagcagagaaagtatttcctccgctggatttcactcagcagcctccagctcaagagttgatggcgaaagacctccatggaaatgaatggaaattccgtcatatctttcgtggccaaccgaagcggcatcttctgactacgggttggagcgtctttgtaagtgcaaagagactggttgctggagactctgtcctttttatctggaatgacagtaatcagctgcttctgggaattcgtcgggcaaataggccacaaacggtcatgccatcatcagtattgtctagtgacagcatgcatattggtctgcttgctgcagctgctcacgccgcatcaacaaatagccggtttactattttctataatccaagagcaagcccttcggagtttgttataccactggctaaatatgtaaaggctgtctaccatacccgcatatcggtgggcatgcgtttccggatgctttttgaaacagaagaatccagtgttaggagatacatggggacaataacaggaataagtgatcttgatcctgttcgttggatgaactcacactggcgctctgtcaaggttggatgggatgagtcgactgctggagagagacagccaagggtgtctctttgggagatcgagcctctgacaactttcccgatgtatccatctccttttcctctcagactaaagcgtccatggccaacaggcttaccttctttatatggcggaaaggaggatgacttggcttcttctcttatgtggcttcgagatagtcaaaacacaggtttccaatctctg

SEQ ID NO: 287 - protein, 396 aa, Oryza sativa
EEQKCLNSELWHACAGPLVSLPAVGSRVVYFPQGHSEQVAASTNKEMESQIPNYPNLPPQLICQLHNVTMHADAETDEVYAQMTLQPLSPQELKDPFLPAELGTASKQPTNYFCKTLTASDTSTHGGFSVPRRAAEKVFPPLDFTQQPPAQELMAKDLHGNEWKFRHIFRGQPKRHLLTTGWSVFVSAKRLVAGDSVLFIWNDSNQLLLGIRRANRPQTVMPSSVLSSDSMHIGLLAAAAHAASTNSRFTIFYNPRASPSEFVIPLAKYVKAVYHTRISVGMRFRMLFETEESSVRRYMGTITGISDLDPVRWMNSHWRSVKVGWDESTAGERQPRVSLWEIEPLTTFPMYPSPFPLRLKRPWPTGLPSLYGGKEDDLASSLMWLRDSQNTGFQSL

SEQ ID NO: 288 - DNA, 1437 bp, Ricinus communis
atgaggctctcttcagctggttttaatccacaaacacaagaaggggagaatagggttttgaattctgaactttggcatgcatgtgcgggtccacttgtttctctacctgctgttggaagccgtgttgtttatttcccacagggtcatagcgagcaagttgctgcatcaaccaacaaggaggtggatgcccatatccctaattacccaagtttacccccgcaacttatatgtcagcttcacaatgtgaccatgcatgcagatgttgagacagatgaagtgtatgcacagatgaccttgcaaccattaagtcctcaagagcaaaaggatgcataccttccagcagaattgggcactcccaacaaacagccaacaaactacttctgtaaaactctgacggctagtgatacaagtactcatggtggattttcagtccctcgccgggcagctgagaaagtgtttcctcccttggacttctcccagcaacctccagctcaagagttgattgctagggatctgcatgataatgaatggaaattcaggcacatctttcgtgggcagcccaaaaggcaccttcttacaacagggtggagtgtgtttgtaagtgctaaaagacttgttgctggggattcggtcctttttatctggaatgaaaagaatcaattgttgcttggtatacggcgtgccaatcgtcctcaaactgtgatgccttcatcggtcttatcaagtgacagcatgcacttagggcttcttgctgctgcagctcatgcagctgcaacaaatagccgtttcaccatattttacaatccgagggctagcccctcagagtttgtaataccactggcaaagtatgttaaagcggtctatcatacccgggtttctgtgggcatgcgctttaggatgctgtttgaaacagaagagtcaagtgttcgtcgctacatgggcacaataactggcataagtgacttagatcctgttaggtggccaaattcacattggcgctcggtcaaggttggctgggatgaatccacagctggagaaagacaaccaagagtttccctatgggaaattgagccgctaacaacattcccaatgtatccatctccatttcctctgaggcttaaacgaccttggccccctggactaccctcatttcatggcatcaaggatgatgatctgggaatgaattctccccttatgtggctgagaggagatgcagatcgtggaattcaatctatgaattttcaggggctaggagttactccatggatgcagccaagggttgatgcttccatgcttggtttgcaaactgatatgtaccaagctatggctgctgctgcacttcaggagatgagggctatagatccttctaaatcaccaactacgtccctttgcaattccagcaacatgcaaatctcccaagcaggactgctgctttaa

SEQ ID NO: 289 - protein, 478 aa, Ricinus communis
MRLSSAGFNPQTQEGENRVLNSELWHACAGPLVSLPAVGSRVVYFPQGHSEQVAASTNKEVDAHIPNYPSLPPQLICQLHNVTMHADVETDEVYAQMTLQPLSPQEQKDAYLPAELGTPNKQPTNYFCKTLTASDTSTHGGFSVPRRAAEKVFPPLDFSQQPPAQELIARDLHDNEWKFRHIFRGQPKRHLLTTGWSVFVSAKRLVAGDSVLFIWNEKNQLLLGIRRANRPQTVMPSSVLSSDSMHLGLLAAAAHAAATNSRFTIFYNPRASPSEFVIPLAKYVKAVYHTRVSVGMRFRMLFETEESSVRRYMGTITGISDLDPVRWPNSHWRSVKVGWDESTAGERQPRVSLWEIEPLTTFPMYPSPFPLRLKRPWPPGLPSFHGIKDDDLGMNSPLMWLRGDADRGIQSMNFQGLGVTPWMQPRVDASMLGLQTDMYQAMAAAALQEMRAIDPSKSPTTSLCNSSNMQISQAGLLL

SEQ ID NO: 290 - DNA, 2538 bp, Vitis vinifera
atgaggctctcttcatcgggttttgctcatcaaacagaagaaggggaaaagaaatgcttgaattcggagctatggcatgcatgtgcaggccctcttgtatctctgcctgctgttggaagtcgtgtggtgtacttcccccagggtcacagtgaacaggttgctgcctcaaccaacaaggaagtagatgctcatatccctaactaccctagtttggcccctcaacttatttgtcagcttcataatgtgaccatgcatgcagatgttgagacagatgaagtatatgctcagatgaccttgcaaccattgagtccgcaagagcaaaaagaagtgtgcctgctaccagcagaattgggttcccccagcaaacagccaaccaactatttctgcaaaacattgactgcaagtgacaccagtactcatggaggattctctgttcctcgccgggctgctgaaaaagtgtttcctcctcttgattacacccagcagcctcctgctcaagaattgattgcaagggatcttcatggtaatgaatggaaattcagacatatatttcgtggccagcccaagaggcatcttcttacaacaggatggagtgtgtttgtaagtgcaaaaagacttattgccggcgattctgtcctttttatctggaacgaaaagaatcaattactcctgggtattcggcgagctaatcgtccacaaaccataatgccttcatcagttttatcaagtgatagcatgcatattggccttcttgctgcagctgcccatgcagctgccacaaatagccgctttactatattttacaatccaagggctagtccatcagaattcgtcatacctttggcaaagtatgccaaagcagtctatcatacccgtgtttctgttggtatgcgtttcaggatgctgtttgagacggaagagtcgagtgtccgtcggtacatgggcacaataactggcattagtgatttagatcctgttcgctggccaaactcacattggcgctctgtaaaggttggttgggatgaatccactgccggggagaggcaacccagagtttccttgtgggagattgagcctttaacaacattcccaatgtatccatcccctttcccacttagactgaagcgaccatggccctctgccctaccttccttccacgctcacaaagatggtgatatgagcataaattctccactcatgtggctccgaggagacattggagatcaggggattcagtctttaaattttcagggttatggacttacaccctggatgcaaccaaggcttgatgcatcaatgcttggtttacaatctaacatgcaacaagctatagcagctgcttcgcttcaggaattgagagcactggatccttccaaacatcctgctcagtcccttttgcagttccagcaaccacaaaatgtttccaatagtcctgcttctgtcttccgggggcagatgttgcagcagacacaatctcaacatgcccagcttctgcaacaacagttgcagggtcggcaggcgttgagtaatcaacagcagcaacaacagcttcaacagcagcagcagcaacaacaccatcaacaacagcagcagcaacaacaacatcaacaacagcagccacaacttcaacaaccccagcagctgcatcggcagttgtctgatcagcaacatatcccaaaggtcatatctgctctatctcagctttcatcacccactcaatctctgcctccttccttacagactatcccttcaccaatacagcagcagatttttcctgattctgttgggaacccaattactacatcagatgtttctaccatgcagagtcttttaggttcattctcccaagatggaacatcccatctacttaacttgcatggatcaaatcctgtaatttcttcttctgccttctttcccaagcaagttgcggttgaacctccgcttccctctggaactactcaatgtgtactgccccaggtggaagagttggcaacaccgccttcaaatgcctctgaactctccaccttgttgccaccttttcctggtagagagtactctgtgtaccaaggtgttgctgatccccaaaacaatcttctgtttggggttaatatagactcttcatctcttatgctgcaaaatgggatgtcaaatctaagaagtattggcagtgagaatgattcagtgtctatgccattttctacgcctaattttgcaaatgctccaggcaccgattttccacttaattcagacatgacaacttcaagttgcatagatgaatcaggtttcttgcagtcttctgaaaatttggagcaagtaaacccaccaaccagaacctttgttaaggttcacaagttagggtcctttgggaggtcactggatatcaccaaattcagcagctatgatgagctgcgtggtgagcttggccgaatgtttggccttgaaggccggttggaggaccctctgagatcaggctggcagcttgtatttgttgaccgagagaatgatgttcttctccttggtgatgacccttggcagtaa

SEQ ID NO: 291 - protein, 845 aa, Vitis vinifera
MRLSSSGFAHQTEEGEKKCLNSELWHACAGPLVSLPAVGSRVVYFPQGHSEQVAASTNKEVDAHIPNYPSLAPQLICQLHNVTMHADVETDEVYAQMTLQPLSPQEQKEVCLLPAELGSPSKQPTNYFCKTLTASDTSTHGGFSVPRRAAEKVFPPLDYTQQPPAQELIARDLHGNEWKFRHIFRGQPKRHLLTTGWSVFVSAKRLIAGDSVLFIWNEKNQLLLGIRRANRPQTIMPSSVLSSDSMHIGLLAAAAHAAATNSRFTIFYNPRASPSEFVIPLAKYAKAVYHTRVSVGMRFRMLFETEESSVRRYMGTITGISDLDPVRWPNSHWRSVKVGWDESTAGERQPRVSLWEIEPLTTFPMYPSPFPLRLKRPWPSALPSFHAHKDGDMSINSPLMWLRGDIGDQGIQSLNFQGYGLTPWMQPRLDASMLGLQSNMQQAIAAASLQELRALDPSKHPAQSLLQFQQPQNVSNSPASVFRGQMLQQTQSQHAQLLQQQLQGRQALSNQQQQQQLQQQQQQQHHQQQQQQQQHQQQQPQLQQPQQLHRQLSDQQHIPKVISALSQLSSPTQSLPPSLQTIPSPIQQQIFPDSVGNPITTSDVSTMQSLLGSFSQDGTSHLLNLHGSNPVISSSAFFPKQVAVEPPLPSGTTQCVLPQVEELATPPSNASELSTLLPPFPGREYSVYQGVADPQNNLLFGVNIDSSSLMLQNGMSNLRSIGSENDSVSMPFSTPNFANAPGTDFPLNSDMTTSSCIDESGFLQSSENLEQVNPPTRTFVKVHKLGSFGRSLDITKFSSYDELRGELGRMFGLEGRLEDPLRSGWQLVFVDRENDVLLLGDDPWQ

SEQ ID NO: 292 - DNA, 2688 bp, Sorghum bicolor
atgaacctctccccgcccaagatgtcggagccatcccctgaaagtgacggggaacaaaggtgtctgaactcagagctatggcatgcatgcgcagggccccttgtgtccctgcctgtggttgggagccgggtcgtctactttcctcagggccatagtgagcaggttgctgcatcaactaataaagaagttgatgctcagatcccaaactacccaaacctacctccacaattaatctgccagcttcataatgtcacaatgcatgctgatgcggagactgaagaggtgtatgcccaaatgacactgcaaccattgagcccggaagaacaaaaggaaccttttcttccaatcgaattgggtgctggtagcaagcagccaactaattacttctgcaagacgttgactgcaagtgatacgagtacccatggtggattctctgttccgcgccgagcagctgagaaagtcttccccccattggatttttcacaacagcctccagttcaagagctggttgcaagagatctgcatgataatgagtggaaatttcggcacatttttcgtggtcagccaaaaaggcatctactgacgactggttggagtgtttttgtaagcgcaaaaagactagtagcaggggattcaatcatctttatctggaatgataataaccaacttctcttgggaattcgtcgtgcaaatcgtccacagactgtaatgccctcttctgtgctttcaagtgatagcatgcacattggtcttcttgctgcagcagctcatgctgcagccacaaacagtcgtttcactattttctacaacccccgggctagcccctctgagtttgtcattccactggctaagtatgtgaaagctgtttaccacacgcgtgtgtctgttggaatgcggttccggatgctttttgagacagaggaatcaagtgttagacgatacatgggtacaataacaggcataagtgatctggactcagagcgttggccaaactcgcactggcgttctgtgaaggttggttgggatgagtctacagctggtgataaacagccaagagtttcactatgggagattgagccactgacgacctttccgatgtacccaactgcctttccattaaggctaaagcgtccgtgggcttcaggactacctatgttcaatggtgggaggagcgatgagttcgctcgttattcttctctcatgtggcttcgagatggaaacagaggggctcagtcactgaacttccagggacttggagcatcaccatggcttcagccaagaatagattatccattgatgggtctgaagccagatacttaccagcagatggctgctgccgcactggaagaaattagagctggggatcatttgaagcaaacatcttctctactgccagtccaacagactcaaaatttgaatggtggattagatcctttgtatggaaatcctgttctacagcagatgcaattccaatctcagcagtcacccctgcaagctgtgcagcaaggttatggtcagaatgcaagcgaatctggtttccttcaaaatcagctgcagcagctgcagctgcaaaagcagcaggagccaccacagcagcagcagcagcagacacaagttctgcagcaacaatcgcatcaggaaatgcaacagcacctctcagctagttgtcatgatattgctaacgtagcttctggtgtgtccgagtctggatctgcttgtcaatcacaatcttctttgctttctgggtcatcgttctatcaacagaacctctttgatggaaacaatggcccagatctgcatctgcacaacagtttccacaacttttcaagccaagagtcctccaaccttcttaatctcccaagaagtggccaattaatggcatcagagggatggccttcaaagaggttggctgtggaatctcttgctggtcatgagcttcaacctgtgcagctcaagcttgagaaagtgaatcaccagagtaatgtatctcacgtttctggcaccttgccgccattgtcagcaagagatggttctagtgcccaggcttgtggtacaaatgttcagagtaacctgctttcatcatcatttgctatccatgatggcttgtcaaccgtcaggagtggtggtgttggcagtggaactgatgcgataaccatagcttcgttgagatatggtgatatgaatttgctacctgaaaactccatagcaacgtccagttgtttgggtgaatcaggaaccttcaattctcttgacgatgtttgtggtgtaaacccatcacaaggtggaacctttgtgaaggtttacaaatcagggtccctcgggagatcgctcgatatcaccagattcagcagctactacgagttacgtagcgagctcgagcggttatttggtcttgaaggccaattggaggaccctgtaagatcaggctggcagcttgtattcgtcgaccgggaaaatgatattcttctcgtcggcgacgacccgtggcaggagtttgtgaatagcgtatggtgcataaagatcctctcgccacaagatgtgcagcagatggtccgcggcggaggcgaccttctgtctgcacctggagcgaggatgctgcagagcagtgtctgcgatgactattctgcaggccacgacatgcagaacctcaccggcatcattgcacctgtggtgcctctggactactga

SEQ ID NO: 293 - protein, 895 aa, Sorghum bicolor
MNLSPPKMSEPSPESDGEQRCLNSELWHACAGPLVSLPVVGSRVVYFPQGHSEQVAASTNKEVDAQIPNYPNLPPQLICQLHNVTMHADAETEEVYAQMTLQPLSPEEQKEPFLPIELGAGSKQPTNYFCKTLTASDTSTHGGFSVPRRAAEKVFPPLDFSQQPPVQELVARDLHDNEWKFRHIFRGQPKRHLLTTGWSVFVSAKRLVAGDSIIFIWNDNNQLLLGIRRANRPQTVMPSSVLSSDSMHIGLLAAAAHAAATNSRFTIFYNPRASPSEFVIPLAKYVKAVYHTRVSVGMRFRMLFETEESSVRRYMGTITGISDLDSERWPNSHWRSVKVGWDESTAGDKQPRVSLWEIEPLTTFPMYPTAFPLRLKRPWASGLPMFNGGRSDEFARYSSLMWLRDGNRGAQSLNFQGLGASPWLQPRIDYPLMGLKPDTYQQMAAAALEEIRAGDHLKQTSSLLPVQQTQNLNGGLDPLYGNPVLQQMQFQSQQSPLQAVQQGYGQNASESGFLQNQLQQLQLQKQQEPPQQQQQQTQVLQQQSHQEMQQHLSASCHDIANVASGVSESGSACQSQSSLLSGSSFYQQNLFDGNNGPDLHLHNSFHNFSSQESSNLLNLPRSGQLMASEGWPSKRLAVESLAGHELQPVQLKLEKVNHQSNVSHVSGTLPPLSARDGSSAQACGTNVQSNLLSSSFAIHDGLSTVRSGGVGSGTDAITIASLRYGDMNLLPENSIATSSCLGESGTFNSLDDVCGVNPSQGGTFVKVYKSGSLGRSLDITRFSSYYELRSELERLFGLEGQLEDPVRSGWQLVFVDRENDILLVGDDPWQEFVNSVWCIKILSPQDVQQMVRGGGDLLSAPGARMLQSSVCDDYSAGHDMQNLTGIIAPVVPLDY

SEQ ID NO: 294 - DNA, 3870 bp, Glycine max
  CDS (928)..(2922)
gaaatggtgggcacgaaaggtaataattgttaaaaatgcaaaacacactctctctctttatctctcccaagaaaaaatggaaaaacactcgtaccactctctttccccctcttaaaaggacaccccaaaaataatggcggttgcgttgtgattgattggaggagagagagagagagagagggagggtaaagctatagtagcatggtcaccaagttagaagtagtatagtagtactagtaagtagcatgaacatgaccaatgaccatgaccacaaagcataaccataaaaactaagcacaaacacaaccattgctacttctacttcccatttttccattaccggaattctaatgagccaaacgctgactctcgtttttgtactactctttacccaacgctctttcctctgtatcaaacactgatcctttaacactttctctctcttgttggattcgctgttctttctctgagatctgtgtgcttttcgactctgttcctcttctgggtctcgttgctctttcagattgttgctaaatttggcagaaaaaagccacgtgtatttctgagagattgtgttgtgtataatgaggactttcgttgaggattggaacctggagtgttgggggttaaggaaaactagaaccgaatgatgcgtaaagcaattgtcttttcttgtgacactggttttggttgaaggttcatacgtgggaatcttgttggtattaatggattttaaagggtgtgaagtactgggacaaatataacaaagaatgttattctgttgtgggaaggaaggaagagagggcacggcttgttttgtggtggagggtgtcattttctgagaatttcgttgcctaattggtagtgttgtgattgtgaattcaatttcggggatactaatttgctttagcctctgtttttgctcaaatgagactttcttcagctggttttagtcctccaccccaggaaggggaaaatcgagttctagattcagaactttggcatgcatgtgctggtccccttgtctctttaccagcagttggaagccgcgtggtatactttccacaaggtcacagtgaacaggtggctgtgtcgaccaacaaggaagtagatgctcatatcccaaactatccaagcttgcctcctcaactcatttgtcaacttcataatatgactatgcatgctgatgcggagactgatgaagtgtacgcgcaaatgaccttgcaacctctgaatcctcaagagcaaaaggaggcatacctgccagcggagctgggcaccccaagtaaacagccaacaaactatttctgcaaaactttgacagccagtgacacaagcacacatgggggattctctgtgcctcgcagggcagctgaaaaagtgtttcctccattggatttctctcaacaacctcctgctcaagaattaattgcaagggatttgcatggtaatgagtggaaattcaggcatatcttccggggccagcccaaaaggcatctacttacaaccggatggagtgtctttgtgagtgctaaaaggctagttgctggtgattctgtgctgtttatctggaatgaaaagaaccaactactacttggcatccgccgtgctaatcgaccacaaactgtgatgccttcttcggtgttgtcaagtgatagtatgcacttggggcttcttgctgcagcagctcatgcagctgcaacaaatagtcgtttcaccatcttctataatccacgtgctagcccttcagaatttgtcataccattagcgaagtatgttaaagctgtgtatcatactcgagtttcagttggtatgcggttcaggatgctgtttgaaacagaggagtcaagtgtgcggagatacatgggtacaataactggcattagtgacctggatcctgtccggtggcaaaactcacattggcgctccgtcaaggttggctgggatgaatccactgctggagacaggcaacctagagtgtctctttgggaaattgagccattaactacatttcctatgtatccatctccattcccccttaggcttaaacggccatggcctccaggactgccttcattccatgcaggcatgaaggatgacgattttggcccgaattcacctctgttgtggctccgagatcctgatagagggcttccgtctcttaattttcaggggattgggattaatccttggatgcagccaagatttgatcccaccatgttgaatatgcaaacagacatgtaccaagctgcggctgttcaggacatgaggagtttagatccttccaaacagcattctgcttccttacttccatttcagcaaccacagaacttcccaaacaggactgctgctttaatgcaggcccagatgttgcagcagtcacaacctcagcagatttttggaaatactcaagagaatcaacattccccacaatctcaggctcatcttcagcaacatctacaacatcaacactcgttcaatagtcagcatcatcatcaccaccagcaacaacaacagcgacagcaacatcaagtggtagataatcaacagatttctagtgcagtctctacaatgtctcagtttgtttcagctcctcaacctcaatcaccacctatgcaagctatctcttccatgtgccaacagcaaaacttttctgattcaaacgggaacactgtgactactattgtttctcccctgcacagtatcttgggttcttttccccaggatgaaacatctcacctcctgaaccttcctagaacaagctcttggattcctgttcaaaattcaagtgggtggccctcgaagcgtgtggcagtggatcctctcctttcttccggagcctctcaatgtgttctacctcaggtggagcagctagggcagccacagagtaccatgtctcaaaatgctatttctttaccaccttttcctggtagggagtgctcaatagaccaagaagggagcaatgatccacaaaaccatctcttatttggtgttaatatagagccctcgtcccttctcatgcctaatggaatgtcaagccttaagggggtctgtggaaacaatggctcctcaaccttgccatatcaatcttctaattatctgaatactaccacacggactgattcttcattgaatcatggaatgacccccaacataggcgactcgggtttcctgcagtgtctggaagaggcaggacaaggaaacccactgaacaaaacctttgtgaaggtttataagtcagggtcctttggaaggtcattggatatcactaaattcagcagctaccatgagctgcgtggtgaactcgctcgaatgtttggccttgaaggcgagttggaggaccctgtgagatcaggctggcagcttgtatttgtagaccgagagaacgatgttcttctccttggtgatggcccctggccggaattcgtaaatagcgtatggtgcataaagatactttctcctcaggaagtgcagcagatgggcaacaatggccttgagctgttgaactcgtttccaattcaaaggctctctaatggcatctgtgatgactatgtgagccgtcaagacccaagaaatttaggcactgggataacaaccgtggggtctttagactactaaatagtcttcacttcttctatcacatgtaatattattacccttacttctcaaccctttctttgtgtacggtgggaagcacctttgcctaagtgtagtttacatagcctactctttagcctttggatgttttcctgttttttcctgctaggacatttcataaactaatactgtaactatatggcatctagtcattgtgctagccacaatatatacgatacttaatccgttaggaaaccaaaaaaaaaaaaaaaa

SEQ ID NO: 295 - protein, 665 aa, Glycine max
MRLSSAGFSPPPQEGENRVLDSELWHACAGPLVSLPAVGSRVVYFPQGHSEQVAVSTNKEVDAHIPNYPSLPPQLICQLHNMTMHADAETDEVYAQMTLQPLNPQEQKEAYLPAELGTPSKQPTNYFCKTLTASDTSTHGGFSVPRRAAEKVFPPLDFSQQPPAQELIARDLHGNEWKFRHIFRGQPKRHLLTTGWSVFVSAKRLVAGDSVLFIWNEKNQLLLGIRRANRPQTVMPSSVLSSDSMHLGLLAAAAHAAATNSRFTIFYNPRASPSEFVIPLAKYVKAVYHTRVSVGMRFRMLFETEESSVRRYMGTITGISDLDPVRWQNSHWRSVKVGWDESTAGDRQPRVSLWEIEPLTTFPMYPSPFPLRLKRPWPPGLPSFHAGMKDDDFGPNSPLLWLRDPDRGLPSLNFQGIGINPWMQPRFDPTMLNMQTDMYQAAAVQDMRSLDPSKQHSASLLPFQQPQNFPNRTAALMQAQMLQQSQPQQIFGNTQENQHSPQSQAHLQQHLQHQHSFNSQHHHHHQQQQQRQQHQVVDNQQISSAVSTMSQFVSAPQPQSPPMQAISSMCQQQNFSDSNGNTVTTIVSPLHSILGSFPQDETSHLLNLPRTSSWIPVQNSSGWPSKRVAVDPLLSSGASQCVLPQVEQLGQPQSTMSQNAISLPP

SEQ ID NO: 296 - DNA, 2643 bp, Oryza sativa
ggggaacaaagatgtctgaactcggagctgtggcatgcatgcgctgggccccttgtgtctttgccagtggtcaggagcagggtcgtctactttccacagggccatagcgagcaggttgcggcatcaactaataaggaagttgatgctcaaatcccaaattatccaaacttacctcctcagttaatctgccagcttcataatgtcaccatgcatgctgatgcagagacagatgaagtttatgctcagatgacattgcaaccattgagcccggaagagcaaaaggagcctttccttccaatggagttgggtgctgctagcaagcaacccactaattacttctgcaagacattgactgcaagtgacacgagcactcatggtggtttctctgttccccgccgggcagctgagaaagtcttccctccactagatttttcacagcagcctccggcacaggagctgattgcaagagatttgcatgataatgaatggaaatttcgccatatatttcgtggtcagcctaaaaggcatctcctgacaacaggctggagtgtgtttgtgagtgcgaaaagactagtagcaggagactctgttatatttatctggaatgataacaatcaacttcttttgggaatacgtcgtgcaaatcgccaacagactgttatgccctcttccgtgttgtcaagcgatagcatgcatataggtcttcttgcagcagcagctcatgctgcagccacaaatagtcgcttcactattttctataaccccagggctagcccttctgaatttgtgattccattggccaagtatgtgaaagctgtttaccacacacgtgtatctgttggaatgcgttttagaatgcttttcgagacagaggagtcaagtgtcaggcgatacatgggtacaatcaccagcataagtgatctagattcagtgcgctggccaaactcacactggcgttctgttaaggttggttgggatgagtccaccactggtgataaacagccaagggtttctctttgggagattgagcctttgacaacctttccgatgtaccccagtgcttttcctttaagacttaagcgtccgtgggcttcaggactgcctatgcatggcatgttcaatggtgggggaaatgacgattttgcacgctattcttctctcatgtggcttcgagacggaaatagaggaacccagtccctgaattttcaaggacatggagtctcaccatggcttcagccaagaatagattctccattgctgggccttaagccagacacgtaccagcaaatggctgcagcagcactggaagaaattcgatatggggacccttcaaagcagcatccagctactctgcaataccaacagactcataatctgaacagtggattaaattctctgtttgcaagccatgttctagggcaggtgcagtttcaacctcagcagtcacccctgcaagttgttcagcaaggccattgtcagaacactggtgactctgggttccttcaaggtcagcttccacggctgcagttgcataacactcagcagctgctaaaggagcaagagttgcagcagcagcaaagacagcatgttttacaagagcaatctagtcaagagatgcaacagcagctcccatctagtgatcatcatgttgctgatgtagcttctgagtctggatctgctcctcaggcacaatcatcattgcttagtggatcatcattctacaatcagaacctcttagaaggaaatagtgatccccctttacatctacacaacaatttccacaacttctctaaccaggaagcctcaaaccttcttattttgcctcgaagtagccaattaatggcatcagatgggtggccttcaaagcgattaactttagaatctgctgttcatcctgaagctccgtccatgcaccccaagattgagaaagtaaatcaccagggtatatctcattttcctggcgcctttccaccacaatcagcaagaggctgttccatcgtccaggattgcagggcagatgctgagaaccgcctactttcatcatcatttgaactccaggatggcatgacaagcatcataactgatgctaacagagaaactgatactatggccatacctttgttgagatatagtggtgcagatttgacaactgaaaacaccttagcaacctccaattgtttaggtgaatctggaacgttcaatcctcttaataacatatctgtaaatccatcacaaggagcaacctttgtgaaggtttacaaatcagggtcccttgggagatcacttgacatctccagattcagcagctactgcgagttacgtagtgagcttgagcgtctctttggtcttgaaggccaactggaggaccctgtaagatcaggctggcagcttgtatttgtcgaccgggaaaatgacattcttctcgtcggcgacgatccatggcaggagtttgcaaatagcgtatggtgcatcaaaatactctcgccacaggaggtgcagcagttggttcgtggtggagacggccttctgtcctcacctggagcaaggatgcagcagagcaatgcctgcgacgactattctgcaagccacaacatgcagaatatcgccggaaacattgcatctgtagcgcctctggactactga

SEQ ID NO: 297 - protein, 880 aa, Oryza sativa
GEQRCLNSELWHACAGPLVSLPVVRSRVVYFPQGHSEQVAASTNKEVDAQIPNYPNLPPQLICQLHNVTMHADAETDEVYAQMTLQPLSPEEQKEPFLPMELGAASKQPTNYFCKTLTASDTSTHGGFSVPRRAAEKVFPPLDFSQQPPAQELIARDLHDNEWKFRHIFRGQPKRHLLTTGWSVFVSAKRLVAGDSVIFIWNDNNQLLLGIRRANRQQTVMPSSVLSSDSMHIGLLAAAAHAAATNSRFTIFYNPRASPSEFVIPLAKYVKAVYHTRVSVGMRFRMLFETEESSVRRYMGTITSISDLDSVRWPNSHWRSVKVGWDESTTGDKQPRVSLWEIEPLTTFPMYPSAFPLRLKRPWASGLPMHGMFNGGGNDDFARYSSLMWLRDGNRGTQSLNFQGHGVSPWLQPRIDSPLLGLKPDTYQQMAAAALEEIRYGDPSKQHPATLQYQQTHNLNSGLNSLFASHVLGQVQFQPQQSPLQVVQQGHCQNTGDSGFLQGQLPRLQLHNTQQLLKEQELQQQQRQHVLQEQSSQEMQQQLPSSDHHVADVASESGSAPQAQSSLLSGSSFYNQNLLEGNSDPPLHLHNNFHNFSNQEASNLLILPRSSQLMASDGWPSKRLTLESAVHPEAPSMHPKIEKVNHQGISHFPGAFPPQSARGCSIVQDCRADAENRLLSSSFELQDGMTSIITDANRETDTMAIPLLRYSGADLTTENTLATSNCLGESGTFNPLNNISVNPSQGATFVKVYKSGSLGRSLDISRFSSYCELRSELERLFGLEGQLEDPVRSGWQLVFVDRENDILLVGDDPWQEFANSVWCIKILSPQEVQQLVRGGDGLLSSPGARMQQSNACDDYSASHNMQNIAGNIASVAPLDY

SEQ ID NO: 298 - DNA, 2671 bp, Zea mays
ggagatgaacctctcaccgcccaggatgtcggagccatcgcttgaaagtgacggggaacaaaggtgtctgaactcggagctatggcatgcatgcgcagggccccttgtgtcccttcctgtggttgggagccgggtcgtctactttccccagggccatagtgagcaggttgctgcatcaactaataaagaagttgacgctcagatcccaaactacccaaacctacctccacaattaatctgccagcttcataatgtcacaatgcatgctgatgcagagactggagaggtttatgcccagatgacactgcaaccattgagcccggaagagcaaaaggaaccttttcttccaattgaattgggtgctggtagcaaccagccaactaattacttctgcaagacgttgactgcaagtgatacgagtacccatggcgggttctctgttccacgccgagcagctgagaaagtcttccccccattggatttttcacaacaccctccagtgcaagagctggttgcaagagatctgcatgataatgagtggaaattccgccacatttttcgtggtcagccaaaaaggcatctactgacgactggttggagtgtttttgtaagcgcaaaaagactagtagcaggggattctatcatatttatctggaatgataataaccagcttctattgggaattcgtcgagcaaatcgtccacagactgttatgccctcttccgtgctatcaagcgatagcatgcacattggtctccttgctgcagcagctcatgctgcagccacaaacagtcgtttcactattttctacaacccccgggccagcccttctgagtttgtgattccactggctaagtatgtgaaagctgtctaccacacacgtgtgtctgttggaatgcggtttcggatgctttttgagacagaggaatcaagcgtcagacgatacatgggtacgatcacatgcataagtgatctggactcagagcgttggccaaattcacactggcgttctgtgaaggttggttgggatgagtctacagctggtgataaacagccaagagtttcactctgggagattgaaccactgatggcctttccgatgtacccaactgcctttccattaaggctaaagcgtccgtgggcttcagggctacctatgttcaatggtgggaggagtgatgagttcgctcgttattcttctctcatgtggctccgagatggaaacagaggggctcaatcactgaacttccagggacttggagcatcaccatggcttcaaccaagaatagattatccattattaggtctgaagctagatacttaccagcagatggctgctgctgcactggaagaaattagagctggggatcatttgaagcagatatcttctctcctgccagtgcaacagccacaaaatttgagtggtggattagatcctttatatggaaatcctgttctgcagcagatgcagttccaatctcagcagtcatccttgcaagttgtgcagcaaggttatggtccaaatgcaagcgactctgggttccttcaaaatcagctgcagctgcaaaagcagcaggagccactaccacagcagcagcagcaagctctgcaacaacaatcgcatcaggaaatgcaacatcacctctcagctagctgtcatgatattgctaatgtagcttctggtgtgtctgagtctggatctgcttctcaaacagaatcttctttgctttctgggtcatcgtaccaacagatctatgatggaaacagtggtccaggtctgcatctgcacaacggtttccacaactgttcaagccaagagtcctccaaccttcttaatctctcaagaagtggacaattcatggcatcagagggatggcctttgaagaggttggctgtggaatctctttctggtcatgagctccaacctgtgcagcacaagtttgagaaagtgaatcaccaaagtaatgtgtctcacatttctagcaccttgcccccactgtcagcaagagacagttatagtgcccaggctagtggtacaaatgatcagagtcacctgctttcatcatcatttgcaatccatgatggcttgacagccgtcaggagtggtggtgttggcagtggaactgatgcgataaccatagcttcgttgagatataatgatatgaatttgctacctgaaaaccccatcgcaacttccagttgtttgggcgaatcaggaaccttcaattctctcgacgatgtgtgtggtgtaaacccatcacaaggtggaacctttgtgaaggtttacaaatcagggtcccctgggagatcgctcgacatcaccaggttcagcagctactacgagttacgtagcgagctcgagcggttatttggtcttgaaggccaactggaggaccctgtaagatcaggctggcagcttgtattcgttgaccgggaaaacgatattcttctcgtcggcgatgacccgtggcaggagtttgtgaatagtgtatggtgcataaagatcctctcgccgcaagacgtgcagcagatggtccgcggcggaggcgaccttctgtctacaactggagtgaggacactgcagggcagtgtctgcgatgattattctgcaggccacgacatgcagaatctcaccggcagcatcgcacctgtggtgcctctggactactga

SEQ ID NO: 299 - protein, 888 aa, Zea mays
MNLSPPRMSEPSLESDGEQRCLNSELWHACAGPLVSLPVVGSRVVYFPQGHSEQVAASTNKEVDAQIPNYPNLPPQLICQLHNVTMHADAETGEVYAQMTLQPLSPEEQKEPFLPIELGAGSNQPTNYFCKTLTASDTSTHGGFSVPRRAAEKVFPPLDFSQHPPVQELVARDLHDNEWKFRHIFRGQPKRHLLTTGWSVFVSAKRLVAGDSIIFIWNDNNQLLLGIRRANRPQTVMPSSVLSSDSMHIGLLAAAAHAAATNSRFTIFYNPRASPSEFVIPLAKYVKAVYHTRVSVGMRFRMLFETEESSVRRYMGTITCISDLDSERWPNSHWRSVKVGWDESTAGDKQPRVSLWEIEPLMAFPMYPTAFPLRLKRPWASGLPMFNGGRSDEFARYSSLMWLRDGNRGAQSLNFQGLGASPWLQPRIDYPLLGLKLDTYQQMAAAALEEIRAGDHLKQISSLLPVQQPQNLSGGLDPLYGNPVLQQMQFQSQQSSLQVVQQGYGPNASDSGFLQNQLQLQKQQEPLPQQQQQALQQQSHQEMQHHLSASCHDIANVASGVSESGSASQTESSLLSGSSYQQIYDGNSGPGLHLHNGFHNCSSQESSNLLNLSRSGQFMASEGWPLKRLAVESLSGHELQPVQHKFEKVNHQSNVSHISSTLPPLSARDSYSAQASGTNDQSHLLSSSFAIHDGLTAVRSGGVGSGTDAITIASLRYNDMNLLPENPIATSSCLGESGTFNSLDDVCGVNPSQGGTFVKVYKSGSPGRSLDITRFSSYYELRSELERLFGLEGQLEDPVRSGWQLVFVDRENDILLVGDDPWQEFVNSVWCIKILSPQDVQQMVRGGGDLLSTTGVRTLQGSVCDDYSAGHDMQNLTGSIAPVVPLDY

SEQ ID NO: 300 - DNA, 2655 bp, Populus trichocarpa
atgaggcactcttcagctggttttaatccacaaacccacgaagtggaaaagcgggtgctgaattctgaactatggcacgcatgtgcgggtcctcttgtttctcttcctgctgttggaagccgcgctgtttatttcccacaaggtcacagtgagcaggttgccgcatcaacgaacaaggaagtaaatgcccagattccaagctacccaagcttgcccgcacaacttatctgtcagcttcacaatgtgaccatgcatgcagatgttgagacggatgaagtttatgcacaaatgaccttgcagccactaagtccgcaagagcaaaaggctgcctaccttccagcagatatgggcacccctagcaaacagccaaccaattatttctgtaagactttgactgccagtgacacaagtactcacggaggattctctgtccctcggcgggcagccgagaaagtgttcccaccattggatttttctcagcatcctccagctcaagagttgattgctagggatttgcatgataatgaatggaaattcagacacatatttcgcggccagccgaaaagacaccttcttacaactgggtggagtgtgttcgtgagtgctaaaagacttgttgctggggattcagtgctttttatctggaatgaaaagaatcagctactacttggcattaggcgcgctactcgaccgcaaacagtgatgccttcatcagtcttatcaagcgatagcatgcacttgggccttcttgctgctgcagctcatgcagctgcaacaaatagccgttttaccatattttacaatccaagggctagtccatcagagttcgtcataccactggccaaatatcttaaagctgtttattatactcgtgtgtctgttggcatgcgctttaggatgatgttcgaaacagaagaatcaagtgtccgtcgctacatgggtacaataactggcataagtgacttggatgttgttaggtggccaaattcacaatggcgttcagtcaaggttggctgggatgagtctacagatggggagaggcagccaagagtttctctttgggagattgaaccactaaccactttccctacatatccatctccatttcccctaaggctcaagcggccatggccaccaggactaccctctttccatggtttaggcatcaaggatgatgatctaggaaagaacccgtcccttatgtggctacgaggagatggagactgtggatatcaatctttgaactttcagggaactggagtttctccatgggtgcagccaagagttgatgcttcaatgctaggtttgcaaaatgatgtctaccaaactatggctactgctgcctttcaggaaatgaggactctagatccttccaaatcatcagctgcatcctttttgcaattccagcaacaccagaatctcccaaccaggagtgctgctttaatgcagccacgtgttcaagagaataaacatcagtctcagactccatcccagtcacaccttattcagcaacaactgctgcatcatcacttacttgacagtccacagcagcagcagcagccatttctgcaacaacagcaactggctgaccaacagatcccaaatggtgtctctgcaatatctcaatatgcttcagcctctcaatccctgacaccaccattgcaagctatttcactgtgccagcagcacagctattctgactcaaatgggaaccctgcgacgagccctgctgtttcttccctgcaaagtcttttggactcttttcccccgaatgaatcatctcatttgctaagttggcctagaataaatcccttggtaacttcatctggctggccctcaaagcgagctgctgttgaatctcttacttcctctggagctcctcaatgcatggtgacccaagtggagcagctggggccacttcacacaagcatcactcctagctctgtttctttgccaccctttcctggaagagaatgttcaatagaccgggatggtggcactgatcaacaaaaccatcttctattcggtgtcaacatagagccatcatctcttctactgcagaatggaatgtcaagtctcaggggagttggaagtgatagtgattccacaactatacctttctcttctaattacataagtactgcaggcaccaatttctcgcttaatccagcaatgacaccttcaagttgcattgatgattcatgtttcctgcaatccacagaaaatgcgagccaaggaaatccaccaaccagaacctttgttaaggtttacaagtcagggtcctttggtaggtcactggatatcaccaaattcagcagctacaatgagttgcgcagtgagctttctcgcatgtttggcctcgaaggccaactggaggaccccctgagatcaggctggcagcttgtattcatcgaccgggagaatgatgttcttctccttggtgatggcccctggccggaatttgtaaacagtgtgtggtacatcaaaatactctcaccacaagaagtacagcaaatgggaaaacgaggtttagagcttctgaactcttttccaattcagaggctttccaatggcagctgtgatgactatgcaaaccggcaggattcaaaatcttcgagcactggtataacttctgtggggtctttggactactga

SEQ ID NO: 301 - protein, 884 aa, Populus trichocarpa
MRHSSAGFNPQTHEVEKRVLNSELWHACAGPLVSLPAVGSRAVYFPQGHSEQVAASTNKEVNAQIPSYPSLPAQLICQLHNVTMHADVETDEVYAQMTLQPLSPQEQKAAYLPADMGTPSKQPTNYFCKTLTASDTSTHGGFSVPRRAAEKVFPPLDFSQHPPAQELIARDLHDNEWKFRHIFRGQPKRHLLTTGWSVFVSAKRLVAGDSVLFIWNEKNQLLLGIRRATRPQTVMPSSVLSSDSMHLGLLAAAAHAAATNSRFTIFYNPRASPSEFVIPLAKYLKAVYYTRVSVGMRFRMMFETEESSVRRYMGTITGISDLDVVRWPNSQWRSVKVGWDESTDGERQPRVSLWEIEPLTTFPTYPSPFPLRLKRPWPPGLPSFHGLGIKDDDLGKNPSLMWLRGDGDCGYQSLNFQGTGVSPWVQPRVDASMLGLQNDVYQTMATAAFQEMRTLDPSKSSAASFLQFQQHQNLPTRSAALMQPRVQENKHQSQTPSQSHLIQQQLLHHHLLDSPQQQQQPFLQQQQLADQQIPNGVSAISQYASASQSLTPPLQAISLCQQHSYSDSNGNPATSPAVSSLQSLLDSFPPNESSHLLSWPRINPLVTSSGWPSKRAAVESLTSSGAPQCMVTQVEQLGPLHTSITPSSVSLPPFPGRECSIDRDGGTDQQNHLLFGVNIEPSSLLLQNGMSSLRGVGSDSDSTTIPFSSNYISTAGTNFSLNPAMTPSSCIDDSCFLQSTENASQGNPPTRTFVKVYKSGSFGRSLDITKFSSYNELRSELSRMFGLEGQLEDPLRSGWQLVFIDRENDVLLLGDGPWPEFVNSVWYIKILSPQEVQQMGKRGLELLNSFPIQRLSNGSCDDYANRQDSKSSSTGITSVGSLDY

SEQ ID NO: 302 - DNA, 2646 bp, Solanum lycopersicum
atgagattatcttcagctgggttcaatcctcagccagagatggcagcaggggagaagaaaagcctgaattcagagctgtggcatgcttgtgcagggccactggtctctcttccacatgtaggaaccagagttgtgtattttcctcaagggcatagtgagcaggttgcggcatccacaaacaaggaaataaatggtcatatccctagctatcctggattaccaccccaacttatttgtcagctacacaatgtgaccatggatgcagatgttgagactgatgaagtatatgctcaaatgactctgcagccactaactccacaagagcaaaaagatgtgtgccttctaccagctgaacttgggaccctaagtaaacaaccaagtaattatttctgcaaaacattgactgcaagcgataccagtacccatggtggattctctgtccctcgacgtgctgcagaaaaagttttccctcctcttgattactcgcaacagcctcctgtgcaagagttgattggtaaagatcttcatggaaatgaatggaagttccggcatatatttcgcggccaaccaaagaggcatctcctgacgacaggatggagtgtgtttgtaagtgcgaagagacttgttgcaggcgactcagttatctttatctggaatgaaaataatcaattacttttggggatacgacgtgccaatcgtccgcaaactgttttaccttcctcggtattgtcaagtgatagcatgcacattggtcttctagctgctgcagctcatgcagctgcaacaaatagccggtttacaatatttttcaatccaagggcttgtccatcagaatttgtcatacctctcgccaagtatgctaaagcagtgtatcatacgcgagtttctgttggcatgaggttccaaatgctatttgaaacagaagaatcaagcatccgtaggtatatgggcacaattactggcatcggtgatctagatcctgttcgttggccaaattctcattggcagtctgtaaaggttggatgggatgaatcaactgcaggggagaggcagcctagagtttcactgtgggaaattgaacctctgacaacatttccaatgtatccatctcctttctcccttaggttgaagcggccatggccacctggactgccttcatttcctggtctatcaaatggtgatatgactatgaattctcagcttccatggctgcatggtggcatgggtgatcaggggatacaatcacttaatttccagggatttggtgttactccattcatgcagccaaggttcgatgcttctatgctaggtttgcagcctgacattttgcaagcaatggcagcattagattcttctaagcttgcaaatcagccacttatgcagttccaacatatccctagtacttcagcatcttcgattcagagccagcttttgcatccatccaatttgcaacatactttcctccaaggcctcccggagaaccaactaatatctcaggcacagatgctgcagcagcaattgcagtgccaccaatcttataatactcagcagcaacagttgcagcgccagcgattgtatcatgatcaacaactacaggaaccccatcaagtacagcgtcaagatcagcagcaaaccaaggctcaattgtgttcagctactcagtcacagctttctcatttacaggtcctaggttcaacgggttctcaacaaacattttctgatttagttggtaatcatattaatacatctaacaacagttccaccatgcaaagtctcctgagctcattttcccgtaatggagcatccacttccctgaacatgcctgagaccaactctctagtgtctccttcctcatcatcaaagcgaattgctctagaatctcagatcccttcacaagctccatacatggtgacacaggctgaagttttgacggtgcctaatactaaggtctcagatttttccactttgttttcaccaaatcctggcagacaagttttggattatcaagctgtagcagttagccaaaacaatgcgctatttggagttaatggtatgtcaaacctgaagggtaacagtccggagaacggatctttacctgtgccttatgctacctctaccttcacaagtacagtgggtggcgagtatcccgttaattcagacatgacgacatcaagttgtgtagatgaatcaggtgtcttgcagtcctcagaaaatgtggatcaagcaaactcacttacagaaacctttgttaaggtttacaaatcagagtcctttggacgatcactggatatctccaaatttagcagctataatgagctgcgaagtgagcttgctcgcatgtttggccttgaaggcctgttggaggatcctgagagatcaggctggcagcttgtattcgttgaccgtgagaatgatgttctcctccttggtgatgacccctggcatgagtttgtgaacagtgtttggtacatcaagatactctctccacttgaagtgcagcagatgggcaaacagggcctcgacctaccaagtgctggcaaaacgcagaggatcactagcaatggcaatggctgcgatgattccatgaaccggaaccattcgtgtaatattatgaatgggatccccctggggtcacttgagtactaa

SEQ ID NO: 303 - protein, 881 aa, Solanum lycopersicum
MRLSSAGFNPQPEMAAGEKKSLNSELWHACAGPLVSLPHVGTRVVYFPQGHSEQVAASTNKEINGHIPSYPGLPPQLICQLHNVTMDADVETDEVYAQMTLQPLTPQEQKDVCLLPAELGTLSKQPSNYFCKTLTASDTSTHGGFSVPRRAAEKVFPPLDYSQQPPVQELIGKDLHGNEWKFRHIFRGQPKRHLLTTGWSVFVSAKRLVAGDSVIFIWNENNQLLLGIRRANRPQTVLPSSVLSSDSMHIGLLAAAAHAAATNSRFTIFFNPRACPSEFVIPLAKYAKAVYHTRVSVGMRFQMLFETEESSIRRYMGTITGIGDLDPVRWPNSHWQSVKVGWDESTAGERQPRVSLWEIEPLTTFPMYPSPFSLRLKRPWPPGLPSFPGLSNGDMTMNSQLPWLHGGMGDQGIQSLNFQGFGVTPFMQPRFDASMLGLQPDILQAMAALDSSKLANQPLMQFQHIPSTSASSIQSQLLHPSNLQHTFLQGLPENQLISQAQMLQQQLQCHQSYNTQQQQLQRQRLYHDQQLQEPHQVQRQDQQQTKAQLCSATQSQLSHLQVLGSTGSQQTFSDLVGNHINTSNNSSTMQSLLSSFSRNGASTSLNMPETNSLVSPSSSSKRIALESQIPSQAPYMVTQAEVLTVPNTKVSDFSTLFSPNPGRQVLDYQAVAVSQNNALFGVNGMSNLKGNSPENGSLPVPYATSTFTSTVGGEYPVNSDMTTSSCVDESGVLQSSENVDQANSLTETFVKVYKSESFGRSLDISKFSSYNELRSELARMFGLEGLLEDPERSGWQLVFVDRENDVLLLGDDPWHEFVNSVWYIKILSPLEVQQMGKQGLDLPSAGKTQRITSNGNGCDDSMNRNHSCNIMNGIPLGSLEY

SEQ ID NO: 304 - protein, 15 aa, Artificial sequence
  motif 18
VYFPQGHSEQVAAST

SEQ ID NO: 305 - protein, 8 aa, Artificial sequence
  motif 19
ATFVKVYK

SEQ ID NO: 306 - protein, 102 aa, Artificial sequence
  motif 20
FCKTLTASDTSTHGGFSVPRRAAEKVFPPLDFTQQPPAQELMAKDLHGNEWKFRHIFRGQPKRHLLTTGWSVFVSAKRLVAGDSVLFIWNDSNQLLLGIRRA

SEQ ID NO: 307 - protein, 42 aa, Artificial sequence
  motif 21
AAHAASTNSRFTIFYNPRASPSEFVIPLAKYVKAVYHTRISV

SEQ ID NO: 308 - protein, 183 aa, Artificial sequence
  motif 22
QNTGFQSLNFGGLGMSPWMQPRLDSSLLGLQPDMYQTIAAAAALQNTTKQVSPAMLQFQQPQNIVGRSSLLSSQILQQAQPQFQQMYHQNINGNSIQGHSQPEYLQQPLQHCQSFNEQKPQLQPQQQQQESHQQQPQHQQMQQQKHLSNFQTVPNALSVFSQLSSTPQSTPSTLQTVSPFSQQ

SEQ ID NO: 309 - protein, 96 aa, Artificial sequence
  motif 23
QVKRPHATFVKVYKSGTVGRLLDITRFSSYHELRSEVGRLFGLEGQLEDPLRSGWQLVFVDREDDVLLVGDDPWQEFVNSVSCIKILSPQEVQQMG

SEQ ID NO: 310 - DNA, 2194 bp, Oryza sativa; identical to SEQ ID NO: 57

SEQ ID NO: 311 - DNA, 52 bp, Artificial sequence
  primer: prm09655
ggggacaagtttgtacaaaaaagcaggcttaaacaatgaagctctcgccgtc

SEQ ID NO: 312 - DNA, 50 bp, Artificial sequence
  primer: prm09656
ggggaccactttgtacaagaaagctgggttgctatgagctccctatttct
